United States Patent Application Publication US 2004/0072154 A1 - sequence listing, part 3

SEQ ID NO: 295 - DNA, 90100 bp, Mus musculus
  misc_feature (1696)..(5225): "n" at positions 1696 through 5225 can be any base.
  misc_feature (10303)..(10322): "n" at positions 10303 through 10322 can be any base.
  misc_feature (32410)..(32429): "n" at positions 32410 through 32429 can be any base.
  misc_feature (34679)..(35400): "n" at positions 34679 through 35400 can be any base.
  misc_feature (38214)..(43788): "n" at positions 38214 through 43788 can be any base.
  misc_feature (45408)..(46631): "n" at positions 45408 through 46631 can be any base.
  misc_feature (47453)..(47810): "n" at positions 47453 through 47810 can be any base.
  misc_feature (49495)..(49572): "n" at positions 49495 through 49572 can be any base.
  misc_feature (52976)..(53745): "n" at positions 52976 through 53745 can be any base.
  misc_feature (59340)..(60268): "n" at positions 59340 through 60268 can be any base.
  misc_feature (76210)..(76409): "n" at positons 76210 through 76409 can be any base.
  misc_feature (83590)..(83609): "n" at positions 83590 through 83609 can be any base.
  misc_feature (88024)..(88383): "n" at positions 88024 through 88383 can be any base.
gggtcctttgacaaccccaaaaggtcatgacccacaggttgaaagccacagcaagctgacctcccagccagattgaacttgacctcatcaatctttattgtgttcatggaggtcagaggacagcttgtgcagttgtcagggaatgaccaggctctgaccttttccttcagacaagcagggaagtctcagccctaatccttgttcctctgtgcaaactcaagcttgcaggttggaagggcaacaggagaaagagttccttctcctgacttaaactcctagcaatcaaataaataaatatattgatagataaaagctaggcagtggtgatacatgttttttgtttgttgaggcagggtttctctgtgtagccctggctgtcctggaactcattctgtagaccaggctggccgcaaactcacagagatccacctgtctctgatgggattaaagacttgtaccgccaggcagaggtggcacaggcctttaatcccagagtttgggaggcatgggaggctctatagaaccagttctaagacagcaaaggctacacaaagaaaacctgtctctaaaaaacaaaagcaaaacaaaagaatctaagggcctgggacaacacaggtttcactcttctgacctctggaaacatacagacctggtttaaaatgctggctctgtcacctagttgccgacttgctgggtggtcttgggaaggtcagttacccggtatagtgttctgtaggcctccccttaatggaattacggtaggataatactttaagccctaagaaggagatgagatgctggtgacagtgtcagtgacaacacaatgacctctgcattgtgggtggcaaagacaagtcaataaaggtgtagggggtatcttctctcttgatgagaatagcacaggtgcatctgggaaatggctgctcttctcacaagctctctgaagtgccacagtggcatgggagaaacaataatatcgctgctctggccaaaggatccggtcctggccttctagcttgggtgggcaggaggcaggagcagattggcttctggaacaggtagcacccctgggatctctagctggagtcagctaatacatccacactgctgggatcttgtcccaagcaaggtcttctgctgcttctggccttgggaagcccttggaggtcattcagttgctttgtgttgcttctgatatcattacctcaacgttatgaatccttcttgtacaacatgttcaagatctatctatctatctatctatctatctatctatctatctatctatctatctatctatctatctatctatcggtatatctcatatccattttccattttctttctagaaagagccatacctgactgtaatgccatgtgcctgggttttcaatatagaccatatgggaataagactccaggctgattgattcacattcgttagtaagtgcggtctaggaaaaggcaacctaagtacagaggaagaacacgctctgggcagaggggactgtagggatccaagcaggaagtcttcgtacctgagtactattactgtcaggagtcgggtgaaaggaaaggaaggcatttaaggcagcaagcaaccacatggagttattcctgggcacaaccacaagtcattcaattttggaagcagagagaagggatttatcaaatgtatgacttaaaagtatcattnnnnnnnnnnnnnnnnnnnnnnnnnnnnnnnnnnnnnnnnnnnnnnnnnnnnnnnnnnnnnnnnnnnnnnnnnnnnnnnnnnnnnnnnnnnnnnnnnnnnnnnnnnnnnnnnnnnnnnnnnnnnnnnnnnnnnnnnnnnnnnnnnnnnnnnnnnnnnnnnnnnnnnnnnnnnnnnnnnnnnnnnnnnnnnnnnnnnnnnnnnnnnnnnnnnnnnnnnnnnnnnnnnnnnnnnnnnnnnnnnnnnnnnnnnnnnnnnnnnnnnnnnnnnnnnnnnnnnnnnnnnnnnnnnnnnnnnnnnnnnnnnnnnnnnnnnnnnnnnnnnnnnnnnnnnnnnnnnnnnnnnnnnnnnnnnnnnnnnnnnnnnnnnnnnnnnnnnnnnnnnnnnnnnnnnnnnnnnnnnnnnnnnnnnnnnnnnnnnnnnnnnnnnnnnnnnnnnnnnnnnnnnnnnnnnnnnnnnnnnnnnnnnnnnnnnnnnnnnnnnnnnnnnnnnnnnnnnnnnnnnnnnnnnnnnnnnnnnnnnnnnnnnnnnnnnnnnnnnnnnnnnnnnnnnnnnnnnnnnnnnnnnnnnnnnnnnnnnnnnnnnnnnnnnnnnnnnnnnnnnnnnnnnnnnnnnnnnnnnnnnnnnnnnnnnnnnnnnnnnnnnnnnnnnnnnnnnnnnnnnnnnnnnnnnnnnnnnnnnnnnnnnnnnnnnnnnnnnnnnnnnnnnnnnnnnnnnnnnnnnnnnnnnnnnnnnnnnnnnnnnnnnnnnnnnnnnnnnnnnnnnnnnnnnnnnnnnnnnnnnnnnnnnnnnnnnnnnnnnnnnnnnnnnnnnnnnnnnnnnnnnnnnnnnnnnnnnnnnnnnnnnnnnnnnnnnnnnnnnnnnnnnnnnnnnnnnnnnnnnnnnnnnnnnnnnnnnnnnnnnnnnnnnnnnnnnnnnnnnnnnnnnnnnnnnnnnnnnnnnnnnnnnnnnnnnnnnnnnnnnnnnnnnnnnnnnnnnnnnnnnnnnnnnnnnnnnnnnnnnnnnnnnnnnnnnnnnnnnnnnnnnnnnnnnnnnnnnnnnnnnnnnnnnnnnnnnnnnnnnnnnnnnnnnnnnnnnnnnnnnnnnnnnnnnnnnnnnnnnnnnnnnnnnnnnnnnnnnnnnnnnnnnnnnnnnnnnnnnnnnnnnnnnnnnnnnnnnnnnnnnnnnnnnnnnnnnnnnnnnnnnnnnnnnnnnnnnnnnnnnnnnnnnnnnnnnnnnnnnnnnnnnnnnnnnnnnnnnnnnnnnnnnnnnnnnnnnnnnnnnnnnnnnnnnnnnnnnnnnnnnnnnnnnnnnnnnnnnnnnnnnnnnnnnnnnnnnnnnnnnnnnnnnnnnnnnnnnnnnnnnnnnnnnnnnnnnnnnnnnnnnnnnnnnnnnnnnnnnnnnnnnnnnnnnnnnnnnnnnnnnnnnnnnnnnnnnnnnnnnnnnnnnnnnnnnnnnnnnnnnnnnnnnnnnnnnnnnnnnnnnnnnnnnnnnnnnnnnnnnnnnnnnnnnnnnnnnnnnnnnnnnnnnnnnnnnnnnnnnnnnnnnnnnnnnnnnnnnnnnnnnnnnnnnnnnnnnnnnnnnnnnnnnnnnnnnnnnnnnnnnnnnnnnnnnnnnnnnnnnnnnnnnnnnnnnnnnnnnnnnnnnnnnnnnnnnnnnnnnnnnnnnnnnnnnnnnnnnnnnnnnnnnnnnnnnnnnnnnnnnnnnnnnnnnnnnnnnnnnnnnnnnnnnnnnnnnnnnnnnnnnnnnnnnnnnnnnnnnnnnnnnnnnnnnnnnnnnnnnnnnnnnnnnnnnnnnnnnnnnnnnnnnnnnnnnnnnnnnnnnnnnnnnnnnnnnnnnnnnnnnnnnnnnnnnnnnnnnnnnnnnnnnnnnnnnnnnnnnnnnnnnnnnnnnnnnnnnnnnnnnnnnnnnnnnnnnnnnnnnnnnnnnnnnnnnnnnnnnnnnnnnnnnnnnnnnnnnnnnnnnnnnnnnnnnnnnnnnnnnnnnnnnnnnnnnnnnnnnnnnnnnnnnnnnnnnnnnnnnnnnnnnnnnnnnnnnnnnnnnnnnnnnnnnnnnnnnnnnnnnnnnnnnnnnnnnnnnnnnnnnnnnnnnnnnnnnnnnnnnnnnnnnnnnnnnnnnnnnnnnnnnnnnnnnnnnnnnnnnnnnnnnnnnnnnnnnnnnnnnnnnnnnnnnnnnnnnnnnnnnnnnnnnnnnnnnnnnnnnnnnnnnnnnnnnnnnnnnnnnnnnnnnnnnnnnnnnnnnnnnnnnnnnnnnnnnnnnnnnnnnnnnnnnnnnnnnnnnnnnnnnnnnnnnnnnnnnnnnnnnnnnnnnnnnnnnnnnnnnnnnnnnnnnnnnnnnnnnnnnnnnnnnnnnnnnnnnnnnnnnnnnnnnnnnnnnnnnnnnnnnnnnnnnnnnnnnnnnnnnnnnnnnnnnnnnnnnnnnnnnnnnnnnnnnnnnnnnnnnnnnnnnnnnnnnnnnnnnnnnnnnnnnnnnnnnnnnnnnnnnnnnnnnnnnnnnnnnnnnnnnnnnnnnnnnnnnnnnnnnnnnnnnnnnnnnnnnnnnnnnnnnnnnnnnnnnnnnnnnnnnnnnnnnnnnnnnnnnnnnnnnnnnnnnnnnnnnnnnnnnnnnnnnnnnnnnnnnnnnnnnnnnnnnnnnnnnnnnnnnnnnnnnnnnnnnnnnnnnnnnnnnnnnnnnnnnnnnnnnnnnnnnnnnnnnnnnnnnnnnnnnnnnnnnnnnnnnnnnnnnnnnnnnnnnnnnnnnnnnnnnnnnnnnnnnnnnnnnnnnnnnnnnnnnnnnnnnnnnnnnnnnnnnnnnnnnnnnnnnnnnnnnnnnnnnnnnnnnnnnnnnnnnnnnnnnnnnnnnnnnnnnnnnnnnnnnnnnnnnnnnnnnnnnnnnnnnnnnnnnnnnnnnnnnnnnnnnnnnnnnnnnnnnnnnnnnnnnnnnnnnnnnnnnnnnnnnnnnnnnnnnnnnnnnnnnnnnnnnnnnnnnnnnnnnnnnnnnnnnnnnnnnnnnnnnnnnnnnnnnnnnnnnnnnnnnnnnnnnnnnnnnnnnnnnnnnnnnnnnnnnnnnnnnnnnnnnnnnnnnnnnnnnnnnnnnnnnnnnnnnnnnnnnnnnnnnnnnnnnnnnnnnnnnnnnnnnnnnnnnnnnnnnnnnnnnnnnnnnnnnnnnnnnnnnnnnnnnnnnnnnnnnnnnnnnnnnnnnnnnnnnnnnnnnnnnnnnnnnnnnnnnnnnnnnnnnnnnnnnnnnnnnnnnnnnnnnnnnnnnnnnnnnnnnnnnnnnnnnnnnnnnnnnnnnnnnnnnnnnnnnnnnnnnnnnnnnnnnnnnnnnnnnnnnnnnnnnnnnnnnnnnnnnnnnnnnnnnnnnnnnnnnnnnnnnnnnnnnnnnnnnnnnnnnnnnnnnnnnnnnnnnnnnnnnnnnnnnnnnnnnnnnnnnnnnnnnnnnnnnnnnnnnnnnnnnnnnnnnnnnnnnnnnnnnnnnnnnnnnnnnnnnnnnnnnnnnnnnnnnnnnnnnnnnnnnnnnnnnnnnnnnnnnnnnnnnnnnnnnnnnnnnnnnnnnnnnnnnnnnnnnnnnnnnnatacagaacgctgagtggaaggtgaggaagagctgggagagttggagcagcagtcatatatggtaagctgcagtggttacagtaagcacaaaggcctgaagcaagagctggcttaacagtacacagaaggtaggcatggcaaagggggaaggatgctaggtactcgggccaagcatgcaggacctttgggccatgataaggatttgggacgtttagttttagtaatggggaagtatctagactttctgataaggtattgggcacctttactggggaggaccccaggaaaaaggctgtttgctgagacaaaagtcaggaatcaagacctctctgaggttgctgagtatccagttttgttagacaacagttcaagcaatttccattgctgtgtcatttaactacctagactgtagtttattcccccagggatgttactacctccagagaacatattccaattatcttggaaaacaaggtaattagaattatgataagtattcaccatctcagttctcacaatgaaaaaccacaaggacaaaagtaactccagatagctcagccctccttggcactggggtgggggctgacagcggatggagccactaagttatctgaaactactgttagtgtccagtcgctttcctttcaaggtacaaccctactggaaaggagggatttagtccacagctatttaatgagtacctactatgtgtaggcattcttctatagggatagagcagaaaacaagatttgatatgagggcagattcctgtccttcccagagcagacaggtatgcaagataaatatgtgaaacaccctagaaaaaagtaaagctggcagtggatatttgggattggagggactatggtagttttaaataggctacttagggtcggggccacaagctcattggaggaggagcactgcttagcatctgttggaccttgagtgagtccccctagcccctttcagattcattggacatctaatggaaatgaatggaaaggcctggtatgagacaagcctcgtgcgggggtgggagtaggagcttctgtgaatagtgggtgtgtgtgcagagtggaaagaggaggagctacgtgtcgacaggtaagggcaggggctagcacacatcctggagtcctctgcaattcgagctctacaagatgcaaatgtgcactttataattttttcccacatcccagagcaaaggaaaaaaaatggtgctcatgtggtcacttctttttttcagtgtactgaactagactctggggggtggggggtggggtctcgtcttccctaggcagcacacagaagggaagcctgtagcatcaaaggatacaaactgggctgagacccaggattcttgtttgttacttaactatgaccttggggggaaacccctagatatctgagctaggagaagagcattagatgaaggaaatgcttagtctttttgatcaggtgagcaccacatgtcatctgggtgaggactgcagaggagaaaagagctgtttctgagtcaaacgttatcagagtatggctgcacacacctataattaaagaatttgggagtggagacagaaggggcaagagtccaaggctgtattgagccctgtgtggttctgtctcaaaaccaaccaacccactgaccaactaaccaaagaaatggagaaatatgtcaggactcaagcaacacaatgaaaagcttctggcctgtatggcgtccattatcccattcttgtgtggcactcaggatcagggcaggggagcatttgctttccatggactgaggaggcaagagggtaaggttgtggtacagtcttctgggtcacaagagcctgaactctcctcaagataagccctagagttggcataatctgtcaatcatgatacaaggccccagaaggtagagagctccagcacagcgctgctaggtagtcacgtggctaactcaccatttcacttcataaatcatgtacttcttttcccactgcctcaccatgaggctggctacgatcctccttcttcagcttcctgactgcaggtgctacagtccgtgtatctatacctggtttcatgtataacttctgctacatttaagagtatccatacatgcagccgggcgtggtggcgcacacctgtaatctcagcacttgggaggcagaggtaggcagatttttgagttcgaggccagcctggtttacagagtgagtaccaggacagccagggctacacagagaaaccctgtttccaaaacccaaaaaaaaaaaaaaaaaaaaaaaaaaaaaaaaaaaaaaaaaagaaaagaaaaaaaaaagaatatccatacctatcaataaagttgagattattcctttgttagttgcagtgccagccttcctatataccctttcctgcataatgaggaggacagtctagggcacaaatgaatcccctaaaagccctagctgcatacttgatgcatattaggttcttgactcttgtgcttgtttatgacaggcaagtactctatcaccaagttataggccaagcccagttttcccttccatatctgaatccagactggcttgggatgcttaaagctcctaccttaaactcagaaggactgggattgctcttccctttctcacccatcctcggtggattacatgttgtggatctactatataaaccagtgcttgtcaaactctgatgtgtgaacccattgcctgggggactcccactaatctgcagatgtctggggttggggcgaggctgggaattatcccttcccagcaaggtcaagggttatgcttagatactgacatcgggtcattctttcagtagtaggaatttagacacaactaagttctatcacttaagataaggaccctataaagggtgccaaagactgtttctttaattaacctttccacttttgcttcactcagcttcaaaacccactaagtgcagaatactagcagggctaggccagaggatatttctcttggttttggaacctcctccaggaagatcttgcaactacccctctctacctcttttggctttttgatcttaccttttccctctgatgataattaccctctaattagcacccaccaccatgtcatctaaataattaacctaagtgcagactgcacctctgcctgccatcttcaaacaaatgataaaacaatatcctaagctgctgattaaaaagacaaaattggcccaaataggtcatatatgtataccatatatagtgcaagactggttccttagcataagttaagaggcgatggcctgctgtgaagtcagtcaggctgatactggggaaactgcaaatgcaagaatgtaagttatgaacttaggatcaaaaggaaaacaattcaagtgttgaaaatccaccttaaattcctattgggaagtgctcatgttttttatttttaagagggtggcagaagggagtgccaagggcatctaaccaagggcatgctggagaaaaactctactattaacttatcctctcagtcagaagtttttatttttcctttttagctttgttggaaaaatccattgactacagtggagggagcttgaaatttgaggagtctttaaaagcaaatctggcagaagaggttgtcttttcactaaaagcaattagtagttttctaatttctcagatgagtctccattagctgcaaggccaatgactgaccactcacttctcctaagggaaactgttttagaaagctattttctcattgaaggtttaaaataaaacctctccaagtttctcaaccaggtgattcactgacatgaaaaaaagtctctgcagaagaaaacttaaaaatactccgtccatcattcactaccttcttgtccgggactagttagttgaaaacccaaaccaaaacaaacaatccgtcccccccaaaccaaaactttattatgaacaatttgagacataaatactggtatgatagcatatgtgtacatatcccacagctccaacatcgaaggacatcctcagttaatttattcccttctttcccagtttccagaggcttagtctaaaacaaaataaacgtattggatcattttacctatcaacactttagtgtgtgtgtgtgtgtgtgtgtgtgttttaaatttaaagccacattaccgtaagcacgttcgataaggatgacgataattccttagtaacataaaatactcggggagcgggggtggggtgggggtgtggggtgtcattgctaacaggtaggggacagaactccgtagtggggactgaacaagaaaggagagagaggatgaagtggccggctgaagcggatcccggctgcgaggagaccagcacccgactgctccaggtttcgctgctcgtttacctgcgttggctctctcgcaccgtcagaccaggtcaaaggcggccccaagttccccgcctccaaggtccgggcggtggcccagcaggctcggcgcagctgcacaagtctctgtccctagacaccggagggtccctggaggggaaacgattgacacagctgcctgcactgtgccgcgagccttcccgcgctgcacctgcgtctcgtcgcgtggctaggaactgggactggctccggagtcggtgaagtccagcaggcccttagccagaacctataccgttcgccagctccggaaccgggctttagacaccaggaccttgcggaagagagaactacaactcccgtcgggccacgcggtccgaccaatggtggtagccggcgcgtgcggggcgcggcgcctgcgcggcggtttgagtaagaggccgtacgattggctgcggagtcgggcggccgcgcggggcctgtgggaagcggagtgacggagcgagcggctgttggaggaaggaggtggggggccgggagcgcaaatggcgttgagatggttcagggccctgttcaaactccagcgctgaccattcaccggcggaggcggcggcgcagaaggcggcggcggcccagcgggggcacgtagcgggctcggcaccggcggcggccgccagggaggcctaggccctgtccggccggcgcgcctgaggtggggagggaannnnnnnnnnnnnnnnnnnntgtcgcccgagcttcctatttaccgaagcggagccgcggactgtgacggcagcagagcccctcgcctctctcggtggcaccggtcggcactggtctctcgcgcggggctcccgcgcccgcccgcgggccgttgggagcgggagaggcggaggcggcccgaggccaaagcacccgccaggcgccgagggtaagtgaggtctcgggcggctgcctaggcccggagtgagttggggcgggtggaggcggcaggggcggcgcgaggctcgttgctcacctggcttctaaggaagttgggcaccggaggatcgcaagaaactctttcccttcccacctcttaattttgccttttgaattcttctccggctacttgatttgacttctctcttccaaacccggtccggttgatttgagtcccgaattctttttccccgtcgtctcctccgcctctagccgtcaccgagaggccttgcttcggggactcggtagcagaagcttccggggcgtccgaagcgacatccctttcctaggctgtgggggttgggaggagaaaagttgcgtgagtgtccagcccgaggggtgtctcggctccagcctccgggcgcactcgcagcctcaggtgagggtttctgtttgcccattccactctcctctctttattgaagcccccctaatgcattaccttgggtgtctttcctggaagtggctaggtttctttacagcttcagtgtaaggaggttggttggttgttttgtataccctttccctaatttaaatcgcagtgcacttccatcaaaagtcagctgggctttgggatgaagcgaaggcctcccaaatcgaaaacaatcagttgtgaaccttcttttcctttttagttaggactgttggtgaaatttgaagccagaacaagatagtgtgtctgaaatgtgcgtaaaacgtcatgccaaatatatatgctgaatttgtacatatgttaagcttagataatgccatcgcagtagtctgctgactttttaaaatggacgttatggaaaacagtaaaagcaatcacgtaactcttgtactcatatctcctggattctgtacataataactcaaccatattttctaatcagtacgctccccattccttaatattaaaaaaatcactgatatttcatcaatatttaatgatgttaatacatcagcgaatatttctgagacgtgatcttttaaaaatacagttgtcttattacttagctcagtatcatatattcatttgcagatcttaatcttgcacagtgaatgctttactgttttttacggtgagtttttcagatgtcataaagaagatcaagtctagattttttttttttttttggctttagtcagcatttttagatgattgccatgtatgtgtgcccaaaacattccaactttgttggaatgtatatatgtgtgtaggtctgcgtgtctgtagtcagcttaaagaaatgacttttcttgcctttggcagctgcccaattacacttggttttgtttaataggctatacttaacaagaaagacaatgaagcttgttagtgttcagaactacaaaatggaaactctctgaggaaagctaaaatttcttttagcacagatgtgtacgatgactaaattattattttatctgatcagagttgttttcctttcaaacattagggtggtggtgagttgtcttctgaatatttgctgaactaaattggatagtgattcgttaagttataagaacttaatagaaatactaaaagtgtagctcaaaaatatttgaaaatataagttaaatattattcttattgtaagtttccaagtaatgaagattttccaagcccttaagtaattgcttaccttccccctagaattgataaattgatatttaaactgcagaaggccaaagtgttaagaaatggataatgattgattgtgctataaaagcactataccttatattttttaaagtgtttgatttttttttttgacttttcttgtaaaattttttcagtatatttttgggtaaatcaggtaaatgagtttgtaaattgaagaggaaaatcaaggctatatatttctattttataataataaatcatgtacctttgtaaaatggagttctccaacttcagaaagatgttactcagcaatgagatacaggaagtagaagaatggtttcttgagtttagggagatgaccattgaaggagctttttaaagtcagttaaaatcactttagtctaagaatcagaatctttaagcttgggtagaagctacagattgtactctatgagaaaataagtttttctaaccctttatgaggagctgtaaaaatgtcaaagaactaagtttggccaactgacattgtttagatcctggaaaacttaatatattgtgactaaagattttgtttttgggtgtttacactattctgattaagttgtgtatgaagatatggaatttgcatgttttaagttagatttgtaggtattgcattgtgagttggttagtagtaagctttttttttttaaacattgtaagtttcatatgaatatgtccttattgtaaaaacaagccaaaacaccaccaaacctgatgtatggaagtaaaggatggaaaacgaacctcttcagctcacttattcagactagtttcaaagtttgtgtgctgaatgttgaaaactatataaggaagtcctagggtcttatttttatagagtgcttaaaacttgttaaaaatttgctgattatattttcttaaatttcttttcacagggaatatgaaacaggtgtcaaaatgacatccagatttggaaaaacttacagtaggaaaggaggaaatggcagttcaaaatttgatgaagttttttccaacaaacggactactcttagtacaaaatggggtgagaccacatttatggctaaattagggcagaagaggcccaatttcaaaccagatattcaagaaattccgaagaaacctaaagtagaagaagaagatactggagatccctttggttttgatagtgatgatgagtctctacctgtttcttcaaaaaatttagcccagggtaagggttcatcttactcagaatctagtgaggctgctcagctggaagaagtcacttctgtatttgaagctaatagcaaatgtagtcatgtggtgggtgaagacagttttgcttccgacagatgcttacttgtggaggatactttaattgggaaagagaagagcataagtagaattccagaagacaacgcaaacaaaagtagttgcactaagttgctaacttcaggtaagttttgatgttcctataagccaagaaggcctttttaaagctacttttgtgataatgaaattctaatttattacttgtgtgcatggagtgtttggaaaaaaagggcaactttgtatagttgtttctttccatgtttttgtgggttctagagataaatgcaggttgctaggcttgcgttgcaagcaccccaactgagccatctcattagcaccctaaaagagccaagtgcttgatgggcattgtagtgcttgcttttaattccagctcttagggggcagaggcaggtggatctactagagttagacaccatgtgtgtactgggaactgaacctgggtcctttggaagagaagccagtgctcttaactgctatattatttctacagtccccttgtaaaagaacttaaaactttaaagagttggaggccagcctggtctgcaaaatgagtcctggacagctagggctgttaacaatgagaagccgggtcttaaacagccccaccccactcccttcccccaaaaagtgtgtgtgtgattaccacttgttttttttttttcctccctgcatttatgattagtagaggatattgataagtttgtttagtgtgtgtgtgtgtatgtatatatatatgtatatatatatatatatgtatatatgtatgtatatatatgtatgttgcctgcataccagtttgtgtgctgtgcatgcctggtgccttcagaagctaggagctactagagttagacaccatgtgtgtactgggaactgaacccaggtcctttggaagagaagccagtgctcttaactgctgaattatttctacagtcctcttgtaaaagagcttaaaactttaaaagagctcaatcatatttaaattttaattaaaacaacatcttagaaatttagtatattttgggaacagtcttttataccttatatttattggataatgtttttataatactgtaaattggttggctacctagggggaatttgttacagtcttaatgtaagatagatcaaataatataatggagtgtgacttgcatagccttgttaaaaaaaaaaacgctgagcttttttttctacttttctcacctttgggtgagagtgagctagcttttgttgtcattcccttgatcctctgggctagtactcatttggttgttgccttgttcatatttctcctaaagcattgttcttaagttaagcttagattttcataggaaaacaagtcaaaagaagcctaaaattgtttccaaatgagcttctaaaatttatcatataagcccggtctggttgtgcatgcctttaatcccagcactcaggaggcagaggcaggtggatttctgagttcgaggccagcctggtctacaaagtgagttccaggatattcagggctatacagagaaaccctgtctcgaccccctccccccaaaaaaagttatcatacagataaaatttctgagctcaactgaatttttactcaactctcctcactttgtaaagtttgcagagattatgtgactttctaagatcagctagtagcaaaattggaatgaatttttaaaaattacttttaggtttattattttatacgagttctgcgtgcatttatgtatatataccatatgcatgcttgctgaccaccaaggctagaagagggcatctaattcccctggaactggagttatagacagttgggaactacaatgtgggttctgggaactggaccaggtcctctgcaagagcaaccagtgcacttaaccactgaatgagatttattgattgccaagatgttgagcctactatttgaattgtgtagtattttaattgctggttcttactgattccagatagttgttttacataggaggtaggtggcctgtagaagaagagtgtaggtggctagttgttaaattgtcctggaggaccaagggattatggggaataatactgcagaatgagtttgtttattcattttccccttttcattgactttctgaagatggaacctctggcaactcctatagggtaggaagcaaacttgaagtgtctttaattttaatttttgtaatgctgttagcctattctaaatgcgtacaaatcagttatttttataagccatgtataagttcatgtatttataagttggttctgtaatagagaatgcttttgggctttttagattttcttttctttttttttttttttcattttttgagacagggtttctctgtatagccctggctgtcctggaactcactttatagaccaggctggccttgaactcagaaatccacctgcctctgcctcccaagtgctgggattaaaagcgtgcgctaccatgcccggctagattttcttttcgttgccttttcatctaaacttttggttgtttttttttttttttttttggtttttttgagacagggtttctctgtgtagccctggctgtcctggaactcattctgtagaccaggttgccctcgaactcagaaatctgcctccctctgcctccaagtgctgggattaaaggcgttcgccaccactcccagtttgggatttcttgatttttgcatttttgtcatgttgtcagtgtccttaattttactctgaaaactattaaaaattttatcaacaacttgttcaaagtatgtagatgcacttgttcaacgtgtgcaggtttaagttgcattgtaacttttcagtgagatatttgttcaattactggtttctgcagaggaattatttcacaccaatgagaaaagcttatccaagcttaagagttttatcatttttttctaatagtacatattaagtacatgttttcttctgtaaagaattatgtcatttttttaaagatttatttatttatcatatgtaagtacactgttgctgtcttcagacacaccagaagagggcgtcagatctcattatagatggttgtgagccaccatgtggttgctgggatttgaattcaggacctttggaggagcagtcagtgctcttacccgctgagccatctcaccagccccttatgtcatttttttgattccatctctgggaaccacatagtaggagagaatggactcctgcaggttgtctttggacctctgtacattcaatgtgtacaatgacttgtgtgtccccacatgtgtgcttactcacacagaaataaatgagtaagtgtaataataagttttaaaaacatcagcagttgccattttgtaagtagatgcttaatagataaggaaaagagtagaaagtactacaaactatgtctaagaactctagggaaaggttgagttattaaagtactcaaaacaagaccccaaattttccactttctgaaaagtagtgaaagaaccttgggtattcagtagttgatatatggcaggacttgttgtctctccttgtgaatgttgtgggttgttctgatgctacttgtattctgatgttaattctacgtcctcagaagaggttgcccaggagctgtgtgatctctcctgaaccttattcccattttaactggtcaataaaagctagagcctgtgattgggcagtggcagggaaggaggaggactgaagaagagatgaggaagccaagatggaccagaaccacgtggccaggagaaagcacaggtagcaaagggtcttatagctggggaataagttagtatagtgttagatctgcccaatctaggcttatagcttataattgtaataattggattgtggtggtttttttttttttttttttcgagacagggtttctctgtgtcaccctggctttcctggaactcactctgtagaccaggttggcctcgaactcaaaagttggcttgcctctgcctcccaggtgctgggattcggttggttttttaaactagtcaattcttagacaggtgtggcattaaaatgactgaacaggagctagagttcatctttttgaggtatcagtatattatgaatcattttacttgaccttttatattttattatgatttttaaaagacacagtctcactatatagccctagttgttctggtaatcactgcgtagactaggatttggcctctgccttctgaatgttggggttaaaggaagcacatccatgcctggcttaagatttatctttaattatgtttatgtgtctgtctgtctgtgttgttatgtgcacatgagtgcaggtgccagaggcattggatcctttggagcttgagttataggcagttgagctatctgacacagatactgggaactgaactcaagtcctctgggagagtaatagtcacctttccagactcccccccactttttttttttaaacataaatatgtttgtgtgtgcacatgagcattagaatatggaagttagagtacattattttggagtcagttccgtctttcaaccatgtattccagcaaatgtattcactgtcaggcttgtatgacaagcacttcaacaagctaactcgtcttacccactggagtgaggggttgttttgctgagacaggctttgtatatcctagactggacttgtggacactgtgaacaaggatggccttgggcttctgatctccagcccccactttttgtaaatgtgaagattcaaggcgctctccaccatacctgggttttttttggtgttggttattgaaccagagccttttgtatgctagcaggcactatactaccaattcctgctagtattcaagtttggaatccgggactgtgcattaaaacgttatttattatttatactgggtggtgtgcacctttaatctcagcacttgggaggcagaggcaggtggatttttgagttcaaggccaggctggtctgaatgagctccaggacagcccgggctatacaacgaaaccctgtctagaaaaagcctatgtaccctatgtgggcagtgtctgtagagagcagaatagggtgttggatcccctgggactggagttctagtcgattgtgggtgctggggcttctggaagagtaaccagtacctctgaaccatttgcttaccccaaagatacttttaaaaaggttgcttttgctttttatgtggggttacttctgtttctcctctttgttaatctggactcttgaaaaaattatgtagagacttaaatttctgcttggcatactttctatgccagccagctggaattcagtctacatatcctgccaaatattgagataaccatagcataggctcttaatttgcatggttggtttcatagccaataaatttttttcgtttgcttaaagctgtattgagtgtgtgagctttctggggggtattatcaggacattctgagatttgattttagaaccaaaggtgtttttcaggaaaggggaatgaatagttctacttttgacagttttaaagtgggctgaagaggtggctcaggggttaaggatgcatatggctcttggagaagacctgtgtagcttccagcacctaccagtgattacagtcccaggggaaccaaacatctctggcctctgtgagcacctgcactcttgtttatttacccacacagaaggatataatatgaacatatttttttaaagaaacatgagctacaaacttatctgaggtgatagtcttaataatatcaggaagttagttatttgcctataggtagtgagtgtttgtataaaatgtacttgtcatttttcaagttttatgaaaagtagttaagaaatctgtttctagttccagctttgtgctaagccttttatatttcatagccttgtaaagctggcttaattcatattatataaagtgtaaagcatcattcagaagttggataacttgaattaaatggaatagttgtgaaacacccaaattgctcttttcatattatagtctggtattgttatattctggtagggatgaacttaacaggattttagaataaaacagctgtcataagatagatttttaatttaaaatttattttttattttttatttttggtttttcaagacagggtttctgtgtgtagccctgggtgtcctggaactcactttgtagacgaggctggcctcaaattcagaaatttgaggccagcccttgggcctcccaagtgctgggattaatggcatgtgtcatcactgcccagttcataaaatagattttatcttgatgttgaagtgaattacaagttctcattttttttctatttaagtaatttttaaaaaaagacttatttattttatttgtgtgggtagtttgcctggcatatacatgtgcaccgtgtgtttgcctggtgccatggattccctggactacagttaaagacagttgtaagctaccatgtgagtgctgagaattgtgcctgggtcctttagaggaacatccggtgttcctaaccactgagctatttctccagctcctatttttttgggggagggggcaaaataaggccagagtttttaatacttaccgaataaaatggatcttatttatgtagttaataaatacctttttttgtgtgtgctgtatacaaacaacagtatgcaaattttgtggtagatttttacatgcttttgtttgtttttgcagttgctggagattgtattcagggtcctctacatccagccacatccccagttgccctcctttactaagtagattttgatctctgtcttatttctgtctcgaggctagtacaggctgtcctcatattgaagacatacctgaaaatgatcctcctgcctctgcctcccaagtacaaaggattatagcaggtgccatcatccttttatttcttatctctgccatcatttctcccagcccttcaaggaaagccaaggttgttctcaaaggtcagacaggagtgcaggaggccattagcaagttttccctcacatccaagagaatacccgctttgtggtaattaatgaaattgtaaacataactgtcctcctgtatgctttttaggaggtgtaccatggacttgtgctggtcatgaataactacttttagcacaatgagattttttattatagtacttcacaggacaattgtgcccccccccccccatatatatattctagtcccttagacttagagccatgaacaaccacacctggtttttgagagggagatcaaggatggagcttaaataagcagcattgatttgaaataatacatgtgagactacgtataaaaatatttgaacatgaagtcattaaatatttgaattgagctgtgaaaaaagttcctatacctatagggtggagaaaagaaactaaaaaagaaagataatatgaaacagccagagctattgaaggctcaacttagttgaattggatttgttgatataaaagttaaataaatgagggtttcacagaatggttgtagtggcctgaggattgagaaaattcacatatgtaagtgtacatgttttaaacagaggaactgggacagctgggaacagatggcatgctcaaattagataatatgagaagggtttatttacaaaggtataggagggatataggaaaatcatgggagatgaggcctcatccttggttcttcaaagtgaagctattattaccctgactcaaatgaattaggacttgaagaagcctgctttataaggagctgaatctttctgttgaggacctaattatgttgtctcagggacagcagctccctcctgatagaaccctgtgtcagcctaaagataagggctgttttgttgattggaatgataggaagttggtctaattttagccattctgtatagtaggcctgctagtggttgtgctggtaatgtggtggtggtggtggtggtgattataataatgataacaataatgatataataaattttatatgtaattccagctcctaagtgctggattatagataggctgttttgctcagtttttgagaagtattattgaaatgacttttggtttctctacctagagcctgttgttacgcattgtacattgagttacatctctaatcctcatttatttactatattatctttaaaatgacatataatcttgtgtttcactagagtatttcatatgctagttaaaagaagatgctttacctttcaaattttgatgtaaagtcgattgaggaaattgggaggtttttaatttttttgaaacagtctctaaccaaggctgacttcagattcctctatagcagaaaatgaccttgaatttcttatcctcctatccccatccggagcgctaacattaaactcaggtaccactctgcctgtattgattcagtgcttgaacttgaaccaagggcttgatacgtgctaggcaagctatcaactaagttatatccccagctcctagttcacaaataatagttcattctctgtctttttaggtacttatggttgatatatccacatgttctttccacagtgaaaagtgttttccttcagatttcatgaatacttttttttttaattaggtattttcttcatttaccagatttcatatatactttctatttcttttttggaacttgaacctaagaccttgcattctgtcattgaactattcccctaaccttagcttgtatactgtgtatgaccctaaaaacctaaatatgtgctgcctgtagtagcatgattataatgctagcatttaggacagcaaggtgggggcaatctctaattggaaattagtccaggttacatagttcctcggcagtcttggttacgcagtgaggtcttgtttcaaaaaatacacacaatgtgagatataaaatactgcaatgtggggctggtgagatggctcagtgggtaagagcacccgactgctcttccaaaggtctggagttcaaatcccagcaaccacatggtggctcacaaccatctgtaacgagatctgactccctcttctggagtgtctgaagacagctacagtgtacttacatataataaataaataaataaataataataaaatactggaatgtatatgcatgtgtatgtggatcatgcttttagtacattaaagtactacattttagtacattaaaggatacttttaggatgtgcattgctcagtatttgtagatagatacactttgttctttttagcaggctcatagtttcccattgtgtaggtgtacttgaactgccctgtgtttttgttttcttgttgcaagtaaatgttgcattgaacatctttgtaagtttttgagtaccatgtcacctgtgttagtatactggtaggaattatttcttaaagtaattttggaagggcatatatgttttattaaagttttatttttattactttaaattatatgtaggtatatgtgtctgcatttgggtttgggtatgtgcatataagtacaagtgtcaaggaggccaaaagcataggaccccttgcagttgaaattagaggtggttctgagtcacctgatttatgttggggttagaatttgggtccttaggaagagcagcaagggctcctatgctggaccatctctctagccctggatgtatacagcttaaattttaattgataatgccacatttcttgctaatagtatgcatcctctttcccaaacttggtatcacccttctcctctcaaactttgtacctagctatgtaaaggtagaaaaatagctgctacttgtttttgttgttgttgttttatgttggattgttttcactttagaatatatagtatcttttacacatttttacttgcccttgttttataatagtattggctagaatcttcctacttagcccctttctcagccagccactacagctctccctagaatgacagtatattgttaattgttgtagctttttatgtatatactgtacagttatattgtaaagaatggatttggttcaatttctgagcataaaatttaagatcctagaatcttatatagtattatcttgtaatgaactaaaggctgactgttgtttgttttgtttgttttttgggttttcaaggcagggtttctcactttgtagaccaggctggcctcgaactcagaaatccgcctgcctctgcctcccgagtgctgggattaaaggcgtgcccggctaaggctgacagtttttaaggagctttaggatacatagtgtttactaggtagatgcaaccaggattagagggttgagactttcagagatactcctacctgaaacctcttaaagaagggaagagggaagccaggaagcagaggcccgcggatttctgagttcgaggccagcctggtctacagagtgagttccaggacagccagggctatacagagaaaccctgtctccagaaaaaccaaaaccaaaacaaccccccccccaaaaaaaaaaaaaacaacaaggaagagaagagggaacaagggctaagttgattacttgtggcagaagagccatcatgaaaaccataaaggacagctttttagagcgcttccagataactgatcatgaggtttccgggaggatgatacagcctttcccttatgccttgttcatttttctttctggctctatttacttgtttacttacttagggtttatgagacagggtcccatgtagcccagaaggctctggagtttgttatgttgccaaggataactataaacttccaatcattctgtcttcacctttcaggtgccactatacccagcaactattttcttctcctaatggatgatttgtttagaaacaggacttcctgtataaaattaagaatttgttaagtaaaagtggtcatttaatttctcttagagaatgtgagagttgagacagagtctatgtaacatgctggctttgaattcataatcctggttcatttgcccagccttgtgagggttagtgtctggttttttttttttcgagacagggtttctctgtatagccctggctgtcctggaactcactttgtagaccaggctggcctcgaactcagaaatccgcctgcctctgcctcccgagtgctgggattaaaggcttgcgctaccacgcccggctttagtgtctggttttattgtattgtgttatatatgccttgttcggttgatgaccctgggaggaggaggtggtgggtttgtggggtggacctggaaggagatgtaggatgaagggactgagagaaagggaaggaggggaagttgcagtcaagatgtattgtttgaaagaataaaataaaataaaaaaaaaaccaaaaatatctagccgtcatactgcccgccccaacccctttggtaaatggatattctctacaaatgggtttatctgttaggaaactgggttttgatgtgggagggcagttgaaaagcaattgtaagccgggtggggtggcgcacgactttaatcccagcactcgggaggcagaggcaggcggatttctgagttcgaggccagcctggtctacaaagtgagttccaggacagccagggctatacagagaaaccctgactctaaaaaaacaaaaaacaaacaaaaaaagcaattgtaatatgtaattttggataagatggtgataacctttcaaaagcaagttaagatttttttgctgttggaaagttaagtaatagaggataggacacaataaaatgctgtggagacagcattaaaatgtgtccttggtcagtttttcttttgtagaactcggttgattaaattcgcttttctgtaaaactatctaccgttttagaagtttaaaaaatgtacttgagtaataattcacttttgcttttgctatatataatttgtggattgtttgctgttactgtatactatttccttactgaataatgcatactgaaactactcccttacagaactccttatcactcttccttcttacaagtttacaaagataggctacagcagcagttactgcttaaatcacctgaaaggtacttctaaaatgtataactacaacacacataggagaaatgagggcaataaacttaaaatagtaaactataatgaagtttaactttagatctgttttgttgttgttgtttttgttctttttttttttttttcctgatacggtttctctgtatagccctggctgtccaggaactcactttgtagaccaggctggcctcgaactcagaaatccacctgcctctgcctcccgagtgctgggatcaaaggtgtgccccaccacgcccggctagatctgtttttaaattagaataatgtttacacctaaaacagaaagtcatttttgagaaattaagatagtagaagcctgctattatgcacatgaagcaggaagattactagtttgaggctatcttgggttcaaaagggaaccctgtttaggaaaacaaaaataagctgtgtgtgttagcatgtctttaattccagcagaggcaggtggatctatatgattttagggccagcatgatttatagcaagttgtaggccagtcagtgctacatagtgaaaacctttctcaaaatgaaaacatactacaaccccattaactacccccctccaaagtcccctcagtggaaggctatacagctataaaaatgagttgaagattggagaggtggttcccagcatcatggaacatgtgtacccacgtatatactaataaataaacatgaggtgtagtatagcttagtacatcttagacatgttaggtaagtgctctaactagagttaaattagttcactcctctcttttctttttcttttaaatcagtgccttaagtttcccaggattgtaattaactttgtatcttcttgctgagattacaggcctgtgacacagttaaattatatttaaactcattgagtagcatcaaaaattatatagtgaatttatccatataaaacattgcttttggctgtatttgcaagtgtgttctttaagacttgtaaataaggagagtgttgtggcatatgactttaatctcagcacttggaaggtgcaggcaggcagatctcttgtaagtttgaggccagtctggtctacatcatgagttccaggatagagttacatagtgagaccctatctcaaaacaaaacaaaagatttatttgtaaattgtttttcttagatttagatgtatttttcttgaggcaatattttatttggcatagagtaaatatttgccagtgcttacccattaattaatgttcagggaatccatgatattagtttgagtcatattgctgccttttacttggagggtaaaaaagtaattacttagccgggcagtggtagcgcatgcctttaatctcagcacttgggaggcagaggcaggccaacttctgagttcgaggccaacctggtctacagagtgagtttcaggacagccagggctacacagagaaaccctgtctcgaaaaaccaaaaaaaaaaaaaaaaaaagtaattacttctgatgttaaaaaatttaaggcaacaaaaatgaaattctcacatataaagtagtcattttaagtttgcagtactcgttgatattcataaataggcactatacactacataggtaccagatccactgttaagaaattatgtggcttttaggattatatgaaatatagaaataactagaaaagcttgtggtaggcaggtttctagacaaaattaacatactgtataaacagtcctatttcaggtaagtacaaatgccccttaaaggcatgtgactcaatgttaaatatgtttgagttctactaaatttaagcattgttacttgaaagcataaatgtcatttaatgttatcctcagttgattcagtttcttaattgtaaaatctcttctgagttcaacataacagttttaagaggcttgggtgtccagggacaggctactagaagacatggcagctgtacctactgacagtaggagagtctaatgtgtaaacttttttgttttttatttcaagattattttatactggggctggtgagatggctcagttggtaagagcacccgactgctcttccgaaggtccggagttcaaatcccagcaaccacatggtggctcacaaccatctgtaacaagatctgacgccctcttctggagtgtctgaagacagctacagtgtacttacatagagtaaataattaaattaaaaaaaaaaaaaaaaaaaagattattttatactactgttcagatagccctgctatttgttaatttgcatagtgatgacatttatgtttttaaccggacatatttttcatttttgtagataaagtggagaattttagtgaagaacatgaaaaaaatagtcaccactttcacaaaaatgctgaagatagtactaagaaacccaatgcagaaaccgcagtggcttctgaatataaagctgatgaaactaaagaaacaaatgatacttggaactcccagtctggaaaaagaacagagtctccatctgaaagttgtccagtcaaaggatctgtaagaactggtttatatgaatgggataatgattttgaagatatcaggtcagaagactgtattttaagtttggataatgagtctcttttggagatgaaagacgaggatttaaaaaatcggattggaggattggaaaatctaaatgaaacctttgaagaagatatcatacaaagtgttcttaggccaagcaactgtaggacgtactgtagggccaataaagcgagatcctcacagggagcatcaaattttgataagctaatggatggcaccagtcagtccttagccaaagcaaacagtgaatcaagtaaagatggcctgaatcaggcaaagaaaggtagtgcaagttgtgggaccagttttcgaggaacagttggacggactagagattacactgttttacatccatcttgcttgtcagtgtgtaatgttaccatccaggatactatggaacggagtatggatgagttcaccgcatccactcctgcagatttaggagaggctggccggctcagaaaaaaggcagatattgcaacctccaagaccactactagatttcgacctagtaatactaaatccaaaaaggatgttaaacttgaattttttggttttgaagatcatgatgagacaggaggtgatgaagggggttctggaagttctaattacaaaattaaatattttggctttgacgatctcagcgaaagtgaagatgatgatgatgacgactgtcaagtggaaagaaagaaagacaaaaaaagaactaaaacagctccatcaccttcccagcagcctcctcctgaaagcagcgacaattcccaggatagtcagtctagtactaataatgcaggtaagaattgtaagatgtatatataataaaaaataatatgtatttaatatataaaattttctcaggctttaattaaagggtaggctctttcctaaatattccattttagtttgaaatatataaaatttatttttaattacatgttgatgtgtgtgcctgcatgtggctatatgcatgtgagttcagggttccaaacccaatccaaattgcatgtaagtaagctctcccactgaaatataaccctaggctagcatatggtaatttatgtgataattttatactattgagtctttgggacagagataccaaacatcttgttttagttttgaaaatccaaatgtaatacagacataaggattgatttttttaggacatttagaactgtactgataacagatggttttatgagggaaatactcaaaagaaattaattaaaccctttggaagtagcacaaaacttgaaaaaaattgaaacattctcaaagcctcaaattgtggtctcataggattggaaagtactagtaggtaaggattctctcagttctctcaattctctctctctttgtctctctctttctctctctttttggttttcgaggcagggtttctctgtgtagccctggctgtcctggaactcactctgtagaccaggctggcctcaaactcagaaatccgcctgcctctgcctcctgagtgctgggattaaaggtgtgcaccaccactgctcacagtattctcttttaataataaaatttgtctcaagattgtaggctcaatgataaggtcctcttagtggttgagtctctagtgagagctaggtctatttttgtatcttggagcaatagaacttaaattctggagtatgaaacgttaagactcactttgagaaatgaagttgatattgaataacatttgaaaactataagactacttgaatgagaaacaccaagttacaggtcagtcttgatataacgtgtgaaccagcagtcatttttagaagatgaggttctcttccttctaaattagaagaaaatgtttataaccatttgagaagtaatctaatccttcagtagtttttatgtgaagactcacaggtcattgaactacattgtactagccaaggatagctatcttggttgtttctttgcctcctgactcagcctcccaagtgctaggattaggactgtgcaccactcccaaagattgtgctttttaaaattttgtcctctttggaactggagagatggctcagtggttacgtgtgtttgttgttcttagttcccagcacccacatagtggttcataacttcagttccagagaatctgatgccttaccatctctgcagtctccccaggcaggctcatatacctataccggacggttttgtgcactgtgtattcagatgctgatttctatgcctagacatctgcagtctggacaatggcatggccaagcatctccggtcttaatgttatgtaaaagttgtttcccatcacctctgattgggtaataaagagctgatcagctagttagctgctcagaaatagggcaggacttcctattccagtcctggaaagagactagagaggagagagggagaagatgtggagagaccatgtggataaaccaggaggattctccattgaggtctcttgagagagcagctatgaggacaaacatggactagagtgagccaaggcaagactcagatgtaggtaaaggaccacatagctgggaagtatacagcataaccaggttagatagaatagctctgaacctgcccagcttagtgcttgaagcttgttaataaaaataccaggtctctctgtcttttattcaggagctaaaatgggctagagtgggccctgcagttatatgagaacaaaaggggtgtaagaacatccccccaaagaattagttatgcaaaacactcatatataaatctttaaaaaactttttagagtagttatctttgtttagaagccatccagtgaattccaggccagctaattataagcacccattctcagtaaaagagaaaatgtttgatttttttgctgatagtacaaaaatacaactagaaaagatatgtaataggttttgaagtaagagaatagggttagagtacttcatcaaccactactatttttaatcctttattattttctccaacattaatgtttttaaaaaaccttgtgttttctgataacttgaaacactggaaagctagctagttttgattaccatttcagaaaacttggattttacagaggacttgcctggtgtgcctgagagtgtgaagaagcccataagtaaacaaggagataaatccaaggaaaataccagaaagatttttagtggccccaaacgggtaagtaaagcattaacactggtgttttttttttaataaaaatgtgtgtgtgtgtgtgtgtatgtatacatatatttatcattagagggctcaacccttaactttttattgggaagttaccaatgagccattgtgacattgtttatctcaggatatctgtaaatctttaaaaaaaaaccatatatatatattttttacgatgatatatatacatatatatatatatcattgtaaaaaatgtaatcatatgtctaaatatggcattaaaaataatttttctgggctggagagatggctcagtggttaagagcaccgtctgtttttccagaggtcctgaattcaattcccagcaaccaggtagtggctcacaactgtttataatgtgatctgatgccctcttctggggtgtctgaagacagcgacagtgtactcacttacataaaataaataaatctttaaaaaaataatttttccatgctctaaaatactggttgtttaaactgacatgaggctggttgggagctgagactttttgcttttctgtcttgtaatagtattctgccacatgtcactagtctagaaaaagaccagaattacaaaatacagtttctactaaattctagttgctttcatgtcatcctcagattgaacatttgtaagtcagggatcttctgtgtatctgtctttttgactttttccagttcttttagctatatacctacagtcataccatttgtcaagcttgctcagtaactgggaactgttttgcattccattttatattctcatcagcaatataggctctatcaatttccctcatgtcttggccaacatttactactagacaaaaattactataggcttgttgtgatggttcatgcctttaatcccaggcagaggctagcaagtctttgaatttaggaccaaccttgtctatatagtgaatgagttgaaggccagatacgtagtgagatcctgttgtaaaaaaagaaagttcccacaatagttatagagtagtcatgctttgatcttcatttctataatgaccactgagttagaaacttgttgcacatgctttctagtcattagtgagtctacatgtttgtgtattctgtgtgtgtgtatgtgtgtgtgtatatatatatatgtatgtgtgtgnnnnnnnnnnnnnnnnnnnnatatatatatatatatatatatatatatatgtttgtttgttctgcatgtgcctgtggatgtctcaagaccctatgaggcatcttcctctattgttccctaccttattttttgagacaggatttcactcagcctggagttcatagattcagctagactactactggccagcaaagcccagggaatcttcctgtttctacttttctagagtacaggcatgtgttactgtgcccagtttttatagaagtgctggaattgaactgaggtggtcatgcctgtatggaagtgctttactgactgagctgtctccctaaccctatttgtctgtattttgagaaattgctaattgaatctttttgccctttttaaaattaagggttatttttttatgtttagttgtaggagttcagtagatttttcaaaaaattaaaagaactaacatatgagcctgctgtctcactcctgggcatatacccagagaactccatacctgctgtggggatatttgtactctcaagttcattgctgcttttattgtagcagagaatttgtaatgagcatagttgtccatcaaaatatgattgaatatttggtgtgtgtatgtatgtaatagaatactattcagttgtaaagaaaactatgataaaaaatttcaggaaaatagatggacttagattaaaatacataatattagcctaggctatccactctcagaaagaaaaaaaccacattctctaaagtctagccaattgtgtgtgtgtgtttgtaaacaatgtgggcacatagtataacatgtaagaaagaaaaagaatgctaaatgttaggggatgagaaaagactgagtttctattctattatgtataaaagagcacttccctgagttgaataatgtttggggctactttttctgtgttttatattttttgttaattggcaatgttttgtataatgtaaaatttagttaaaaaaggaattccttattagatacataatttgcaaatattttgtctgcttcttaatgttacaccttcctctttgccaagtttaaaatttttaattatttttttcccttttgttgtctctggttttgatgtcacagccaagaattcattgccaaatttaatataggttttcaaaactgtttttcactcagggttttatagttttattcaggattttggtctatttgagtaatgtttgtttgtagatagggttttggttctctctgtgtaacagtcctggaacttgctttgtagacctggctagcactgcactggcaaagatcctgactccccagtgctgggactaaaaataagtgccaccactacctaacttgagtgaattgtggtgtgtgctataacgtggtgattgtggtccaccttcatttttatgcattgcagcatataatacctagcacaggtacagaatgtttcttgcatttaaaaagtctgctgtgttttgttcttgaacttgcagctaatagttttgtacttgctaattttatgtagctagaatgtaaactctttttattgtcttatatttctcttccttttatttctgtaaaagctcactgggtatcttcaaagtaattctagctgtttagatgcacttttagttcttacatacaaagtggtttttgatatatgttagttttcagagcattatttatcaacaggtgtgggggggtctcaatcactacttttttttttgtttgttttttttgtttttttgagacaggatttctctgtgtagaccaggctgacatcaactcagaaatctgcctgcctctgtctcccaagtgctgccctgctcatgacttctttacttactgataaagaaaatgacacacaaaatatgtatgtaaatttaaatgtcttgctgggtcctttagatttgctcaaatgtatatgtgtttagggttggttaatttacattctttttatttttttacgatttacttattttatgtatgtgagtacactgtagctgtatagatagatggttgtgagccttcatgtggttgttgggaattgacttttttgtgacctctgctcccttcagtcaaccctactcgctctggttggttctgctcgctctgggtcaattccgttcgatccagcccaaagatttatttattattatatataagtacactgtagctgacttcaaatgcatcagaagagggcgtcagatctcattacgtgtggttgtgagccaccatatggttgctgggatttgaactcaggaccatnnnnnnnnnnnnnnnnnnnnnnnnnnnnnnnnnnnnnnnnnnnnnnnnnnnnnnnnnnnnnnnnnnnnnnnnnnnnnnnnnnnnnnnnnnnnnnnnnnnnnnnnnnnnnnnnnnnnnnnnnnnnnnnnnnnnnnnnnnnnnnnnnnnnnnnnnnnnnnnnnnnnnnnnnnnnnnnnnnnnnnnnnnnnnnnnnnnnnnnnnnnnnnnnnnnnnnnnnnnnnnnnnnnnnnnnnnnnnnnnnnnnnnnnnnnnnnnnnnnnnnnnnnnnnnnnnnnnnnnnnnnnnnnnnnnnnnnnnnnnnnnnnnnnnnnnnnnnnnnnnnnnnnnnnnnnnnnnnnnnnnnnnnnnnnnnnnnnnnnnnnnnnnnnnnnnnnnnnnnnnnnnnnnnnnnnnnnnnnnnnnnnnnnnnnnnnnnnnnnnnnnnnnnnnnnnnnnnnnnnnnnnnnnnnnnnnnnnnnnnnnnnnnnnnnnnnnnnnnnnnnnnnnnnnnnnnnnnnnnnnnnnnnnnnnnnnnnnnnnnnnnnnnnnnnnnnnnnnnnnnnnnnnnnnnnnnnnnnnnnnnnnnnnnnnnnnnnnnnnnnnnnnnnnnnnnnnnnnnnnnnnnnnnnnnnnnnnnnnnnnnnnnnnnnnnnnnnnnnnnnnnnnnnnnnnnnnnnnnnnnnnnnnnnnnnnnnnnnnnnnnnnnnnnnnnnnnnnnnnnnnnnnnnnnnnnnnnnnnnnnnctggctttcccctgatttacgattttctaaaatgataaactaatgatttaactatttgtatgaaaaattattttcaaaccaaaaaagtagaagaataacaatactaaacctttatttttgtaaatctctgtagaggcagggtttaaaaaaaaaaaaaagacacttgaaggcttggtgtggtagccatgcatttaatcccagcactggggatgcaggggtaggtaaatcgctgagtttgaggccagccaggactacctgtgacttgggggagaacaattgtatttttctatctttgtattcagtatatttattgtgctatattggtagaaatatttgaagaaaatctaacataaatacgctatatggttacatttttaggtaagcttttgagatgtattttatatttggttcagtacaccaaaacttaaattttagttttttaaagattaacctatgtctgtaagcctttcagactgtttacattagaatattggttctccttacattttgaatatacattttatccatgcatgctttaaaaccatatattttatccatttggaaaatactagccaccctgagttgtgcaaactttctaaggtgacacattttgttaatgctcaatcaaatattcatgttaatatcaagccaaaaaattttgtcagtactaggaagcagtcaagattcacagtagtagatgaaggtttccagaattttagtttttgctagagttgatatttttttctcattggcatcaaatgccttaaagggattagctgacagtgatagtctcattttattcctttacagaaatatttttgccagataccaaagtcttaatcaggatgtttgtcagtctttgaagagtgatgtttctgataaacgtagatatatacagctcaaaaagttgttgtatgcaaaagtatttaatgcacatttgccacacagaacattgagatttaataaattgataattcttcttaggctttatatggagctcatggatatggtttgtggcagtgatgagaagtggtataatttgtaggtcatacagattcttgccaagacaacatcaaactggcttcagcaccatccacaggaatttcaacactgacaaaggcaaataacatcatactgtaattatgaaaatagttttgaatttgtagtctcctgaaagagtttgataaatctttagtgtccatggcctatactttgagacctgatgattgatagtattactttattctgttttcaaaatttttattgtgaaaacttcagatccaaaaagaaatatgaaacccctctactcttggcatgtatttatttttagctagtattttgctatcatgtattcttcctttctatataacaagtttattatacagtagtatcattcatatatatatatatatgtatatatatagtgtagtattaaaataatttcattgttagcataaatatttcttttattccttttttttttttttttttttttgtaaggctttctttgtgtagctctgtcctggaactttctccagaaatcaggctagcttaaaattcagagatcctctgcttctcagtgctgggattaaaagtgtgtgccaccactcccagtctaagcgcgtccctctctctctctctctctctctctctctctctctctctctctctctctctctctctgtctcaaatttagtgatttatttaatgtatgttgagtatactgtcttcagacacactctaagcattcttttttttttttttttttggtttttcgagacagggtttctctgtatagccctggctgtcctggaactcactttgtagaccaggctggcctcgaactcagaaatccacctgctttctgcctcccgagtgctgggattaaaggcgtgcgccaccacacctggccaccctaagcattcttaagaaaaaaaatttcaggctggagagatggctcagtagttaagagcactgactgctcttccagaggtcctgagttcaaatcccagcaaccacatggtggctcacaaccatctgtaatgggatctgatgccctcttctggtgtgtctgaagacagtgacactgtactcatgtacatgagataaagaaataaatcaatcttaaaaaaaagaaaaaagaaaaaaaaacttcctgtttactgataagattaaaacctataagaaaataaatgtattaaaaataattcttaatgctgatcatattgttttcatctaaagtcctcagaagtctttagttccccaccccttttaactaagactcttgtagcagttttgtatgttttgtttttatatagaccgtttcttatttacaaagaattccctttcacacccccccccccctttttttgtggtttttggttttttcgagacagggtttctctgtgtagccctggctgtcctggaactcactttgtagaccaggctgtcctcgaactcagaaatccgcctgcctctgtctcccgagtgctgggattaaaggcatgcgccaccacgcctggtgttttttgtgttttgctttgtgtgtgtgtgtgtgtgtgtgtgtgtgtgtgttttgttttgttttgtttttgttttcctttcacttatttttattaggaagctgtgatacttgtttttagggctgttccacatgtagaagttatctaattattttcttgatattatctgacttgctcttcactattggcttagaaagctgtacattaataaattctggattagatttaagttaattttttttccagagccagagacagcttcatttttgataattgctcatgtttccttatnnnnnnnnnnnnnnnnnnnnnnnnnnnnnnnnnnnnnnnnnnnnnnnnnnnnnnnnnnnnnnnnnnnnnnnnnnnnnnnnnnnnnnnnnnnnnnnnnnnnnnnnnnnnnnnnnnnnnnnnnnnnnnnnnnnnnnnnnnnnnnnnnnnnnnnnnnnnnnnnnnnnnnnnnnnnnnnnnnnnnnnnnnnnnnnnnnnnnnnnnnnnnnnnnnnnnnnnnnnnnnnnnnnnnnnnnnnnnnnnnnnnnnnnnnnnnnnnnnnnnnnnnnnnnnnnnnnnnnnnnnnnnnnnnnnnnnnnnnnnnnnnnnnnnnnnnnnnnnnnnnnnnnnnnnnnnnnnnnnnnnnnnnnnnnnnnnnnnnnnnnnnnnnnnnnnnnnnnnnnnnnnnnnnnnnnnnnnnnnnnnnnnnnnnnnnnnnnnnnnnnnnnnnnnnnnnnnnnnnnnnnnnnnnnnnnnnnnnnnnnnnnnnnnnnnnnnnnnnnnnnnnnnnnnnnnnnnnnnnnnnnnnnnnnnnnnnnnnnnnnnnnnnnnnnnnnnnnnnnnnnnnnnnnnnnnnnnnnnnnnnnnnnnnnnnnnnnnnnnnnnnnnnnnnnnnnnnnnnnnnnnnnnnnnnnnnnnnnnnnnnnnnnnnnnnnnnnnnnnnnnnnnnnnnnnnnnnnnnnnnnnnnnnnnnnnnnnnnnnnnnnnnnnnnnnnnnnnnnnnnnnnnnnnnnnnnnnnnnnnnnnnnnnnnnnnnnnnnnnnnnnnnnnnnnnnnnnnnnnnnnnnnnnnnnnnnnnnnnnnnnnnnnnnnnnnnnnnnnnnnnnnnnnnnnnnnnnnnnnnnnnnnnnnnnnnnnnnnnnnnnnnnnnnnnnnnnnnnnnnnnnnnnnnnnnnnnnnnnnnnnnnnnnnnnnnnnnnnnnnnnnnnnnnnnnnnnnnnnnnnnnnnnnnnnnnnnnnnnnnnnnnnnnnnnnnnnnnnnnnnnnnnnnnnnnnnnnnnnnnnnnnnnnnnnnnnnnnnnnnnnnnnnnnnnnnnnnnnnnnnnnnnnnnnnnnnnnnnnnnnnnnnnnnnnnnnnnnnnnnnnnnnnnnnnnnnnnnnnnnnnnnnnnnnnnnnnnnnnnnnnnnnnnnnnnnnnnnnnnnnnnnnnnnnnnnnnnnnnnnnnnnnnnnnnnnnnnnnnnnnnnnnnnnnnnnnnnnnnnnnnnnnnnnnnnnnnnnnnnnnnnnnnnnnnnnnnnnnnnnnnnnnnnnnnnnnnnnnnnnnnnnnnnnnnnnnnnnnnnnnnnnnnnnnnnnnnnnnnnnnnnnnnnnnnnnnnnnnnnnnnnnnnnnnnnnnnnnnnnnnnnnnnnnnnnnnnnnnnnnnnnnnnnnnnnnnnnnnnnnnnnnnnnnnnnnnnnnnnnnnnnnnnnnnnnnnnnnnnnnnnnnnnnnnnnnnnnnnnnnnnnnnnnnnnnnnnnnnnnnnnnnnnnnnnnnnnnnnnnnnnnnnnnnnnnnnnnnnnnnnnnnnnnnnnnnnnnnnnnnnnnnnnnnnnnnnnnnnnnnnnnnnnnnnnnnnnnnnnnnnnnnnnnnnnnnnnnnnnnnnnnnnnnnnnnnnnnnnnnnnnnnnnnnnnnnnnnnnnnnnnnnnnnnnnnnnnnnnnnnnnnnnnnnnnnnnnnnnnnnnnnnnnnnnnnnnnnnnnnnnnnnnnnnnnnnnnnnnnnnnnnnnnnnnnnnnnnnnnnnnnnnnnnnnnnnnnnnnnnnnnnnnnnnnnnnnnnnnnnnnnnnnnnnnnnnnnnnnnnnnnnnnnnnnnnnnnnnnnnnnnnnnnnnnnnnnnnnnnnnnnnnnnnnnnnnnnnnnnnnnnnnnnnnnnnnnnnnnnnnnnnnnnnnnnnnnnnnnnnnnnnnnnnnnnnnnnnnnnnnnnnnnnnnnnnnnnnnnnnnnnnnnnnnnnnnnnnnnnnnnnnnnnnnnnnnnnnnnnnnnnnnnnnnnnnnnnnnnnnnnnnnnnnnnnnnnnnnnnnnnnnnnnnnnnnnnnnnnnnnnnnnnnnnnnnnnnnnnnnnnnnnnnnnnnnnnnnnnnnnnnnnnnnnnnnnnnnnnnnnnnnnnnnnnnnnnnnnnnnnnnnnnnnnnnnnnnnnnnnnnnnnnnnnnnnnnnnnnnnnnnnnnnnnnnnnnnnnnnnnnnnnnnnnnnnnnnnnnnnnnnnnnnnnnnnnnnnnnnnnnnnnnnnnnnnnnnnnnnnnnnnnnnnnnnnnnnnnnnnnnnnnnnnnnnnnnnnnnnnnnnnnnnnnnnnnnnnnnnnnnnnnnnnnnnnnnnnnnnnnnnnnnnnnnnnnnnnnnnnnnnnnnnnnnnnnnnnnnnnnnnnnnnnnnnnnnnnnnnnnnnnnnnnnnnnnnnnnnnnnnnnnnnnnnnnnnnnnnnnnnnnnnnnnnnnnnnnnnnnnnnnnnnnnnnnnnnnnnnnnnnnnnnnnnnnnnnnnnnnnnnnnnnnnnnnnnnnnnnnnnnnnnnnnnnnnnnnnnnnnnnnnnnnnnnnnnnnnnnnnnnnnnnnnnnnnnnnnnnnnnnnnnnnnnnnnnnnnnnnnnnnnnnnnnnnnnnnnnnnnnnnnnnnnnnnnnnnnnnnnnnnnnnnnnnnnnnnnnnnnnnnnnnnnnnnnnnnnnnnnnnnnnnnnnnnnnnnnnnnnnnnnnnnnnnnnnnnnnnnnnnnnnnnnnnnnnnnnnnnnnnnnnnnnnnnnnnnnnnnnnnnnnnnnnnnnnnnnnnnnnnnnnnnnnnnnnnnnnnnnnnnnnnnnnnnnnnnnnnnnnnnnnnnnnnnnnnnnnnnnnnnnnnnnnnnnnnnnnnnnnnnnnnnnnnnnnnnnnnnnnnnnnnnnnnnnnnnnnnnnnnnnnnnnnnnnnnnnnnnnnnnnnnnnnnnnnnnnnnnnnnnnnnnnnnnnnnnnnnnnnnnnnnnnnnnnnnnnnnnnnnnnnnnnnnnnnnnnnnnnnnnnnnnnnnnnnnnnnnnnnnnnnnnnnnnnnnnnnnnnnnnnnnnnnnnnnnnnnnnnnnnnnnnnnnnnnnnnnnnnnnnnnnnnnnnnnnnnnnnnnnnnnnnnnnnnnnnnnnnnnnnnnnnnnnnnnnnnnnnnnnnnnnnnnnnnnnnnnnnnnnnnnnnnnnnnnnnnnnnnnnnnnnnnnnnnnnnnnnnnnnnnnnnnnnnnnnnnnnnnnnnnnnnnnnnnnnnnnnnnnnnnnnnnnnnnnnnnnnnnnnnnnnnnnnnnnnnnnnnnnnnnnnnnnnnnnnnnnnnnnnnnnnnnnnnnnnnnnnnnnnnnnnnnnnnnnnnnnnnnnnnnnnnnnnnnnnnnnnnnnnnnnnnnnnnnnnnnnnnnnnnnnnnnnnnnnnnnnnnnnnnnnnnnnnnnnnnnnnnnnnnnnnnnnnnnnnnnnnnnnnnnnnnnnnnnnnnnnnnnnnnnnnnnnnnnnnnnnnnnnnnnnnnnnnnnnnnnnnnnnnnnnnnnnnnnnnnnnnnnnnnnnnnnnnnnnnnnnnnnnnnnnnnnnnnnnnnnnnnnnnnnnnnnnnnnnnnnnnnnnnnnnnnnnnnnnnnnnnnnnnnnnnnnnnnnnnnnnnnnnnnnnnnnnnnnnnnnnnnnnnnnnnnnnnnnnnnnnnnnnnnnnnnnnnnnnnnnnnnnnnnnnnnnnnnnnnnnnnnnnnnnnnnnnnnnnnnnnnnnnnnnnnnnnnnnnnnnnnnnnnnnnnnnnnnnnnnnnnnnnnnnnnnnnnnnnnnnnnnnnnnnnnnnnnnnnnnnnnnnnnnnnnnnnnnnnnnnnnnnnnnnnnnnnnnnnnnnnnnnnnnnnnnnnnnnnnnnnnnnnnnnnnnnnnnnnnnnnnnnnnnnnnnnnnnnnnnnnnnnnnnnnnnnnnnnnnnnnnnnnnnnnnnnnnnnnnnnnnnnnnnnnnnnnnnnnnnnnnnnnnnnnnnnnnnnnnnnnnnnnnnnnnnnnnnnnnnnnnnnnnnnnnnnnnnnnnnnnnnnnnnnnnnnnnnnnnnnnnnnnnnnnnnnnnnnnnnnnnnnnnnnnnnnnnnnnnnnnnnnnnnnnnnnnnnnnnnnnnnnnnnnnnnnnnnnnnnnnnnnnnnnnnnnnnnnnnnnnnnnnnnnnnnnnnnnnnnnnnnnnnnnnnnnnnnnnnnnnnnnnnnnnnnnnnnnnnnnnnnnnnnnnnnnnnnnnnnnnnnnnnnnnnnnnnnnnnnnnnnnnnnnnnnnnnnnnnnnnnnnnnnnnnnnnnnnnnnnnnnnnnnnnnnnnnnnnnnnnnnnnnnnnnnnnnnnnnnnnnnnnnnnnnnnnnnnnnnnnnnnnnnnnnnnnnnnnnnnnnnnnnnnnnnnnnnnnnnnnnnnnnnnnnnnnnnnnnnnnnnnnnnnnnnnnnnnnnnnnnnnnnnnnnnnnnnnnnnnnnnnnnnnnnnnnnnnnnnnnnnnnnnnnnnnnnnnnnnnnnnnnnnnnnnnnnnnnnnnnnnnnnnnnnnnnnnnnnnnnnnnnnnnnnnnnnnnnnnnnnnnnnnnnnnnnnnnnnnnnnnnnnnnnnnnnnnnnnnnnnnnnnnnnnnnnnnnnnnnnnnnnnnnnnnnnnnnnnnnnnnnnnnnnnnnnnnnnnnnnnnnnnnnnnnnnnnnnnnnnnnnnnnnnnnnnnnnnnnnnnnnnnnnnnnnnnnnnnnnnnnnnnnnnnnnnnnnnnnnnnnnnnnnnnnnnnnnnnnnnnnnnnnnnnnnnnnnnnnnnnnnnnnnnnnnnnnnnnnnnnnnnnnnnnnnnnnnnnnnnnnnnnnnnnnnnnnnnnnnnnnnnnnnnnnnnnnnnnnnnnnnnnnnnnnnnnnnnnnnnnnnnnnnnnnnnnnnnnnnnnnnnnnnnnnnnnnnnnnnnnnnnnnnnnnnnnnnnnnnnnnnnnnnnnnnnnnnnnnnnnnnnnnnnnnnnnnnnnnnnnnnnnnnnnnnnnnnnnnnnnnnnnnnnnnnnnnnnnnnnnnnnnnnnnnnnnnnnnnnnnnnnnnnnnnnnnnnnnnnnnnnnnnnnnnnnnnnnnnnnnnnnnnnnnnnnnnnnnnnnnnnnnnnnnnnnnnnnnnnnnnnnnnnnnnnnnnnnnnnnnnnnnnnnnnnnnnnnnnnnnnnnnnnnnnnnnnnnnnnnnnnnnnnnnnnnnnnnnnnnnnnnnnnnnnnnnnnnnnnnnnnnnnnnnnnnnnnnnnnnnnnnnnnnnnnnnnnnnnnnnnnnnnnnnnnnnnnnnnnnnnnnnnnnnnnnnnnnnnnnnnnnnnnnnnnnnnnnnnnnnnnnnnnnnnnnnnnnnnnnnnnnnnnnnnnnnnnnnnnnnnnnnnnnnnnnnnnnnnnnnnnnnnnnnnnnnnnnnnnnnnnnnnnnnnnnnnnnnnnnnnnnnnnnnnnnnnnnnnnnnnnnnnnnnnnnnnnnnnnnnnnnnnnnnnnnnnnnnnnnnnnnnnnnnnnnnnnnnnnnnnnnnnnnnnnnnnnnnnnnnnnnnnnnnnnnnnnnnnnnnnnnnnnnnnnnnnnnnnnnnnnnnnnnnnnnnnnnnnnnnnnnnnnnnnnnnnnnnnnnnnnnnnnnnnnnnnnnnnnnnnnnnnnnnnnnnnnnnnnnnnnnnnnnnnnnnnnnnnggatttttaggaattagacttgaacataactgaatttaagtaaccttggttaagttttaagaattgatcatttgagctgggcagtggtggagcatgcctcccgcacttgggaggcagaggcaggcggatttctgagtttgaggccagcctggtctacagagtgagttccagaacagccagggctacacacagagagaaaccgtgtctcgaaaacaacaacaaaaaaaaaccaaccaaacaaacaaaaaaaaaaggaattgatatttggaaattgtggtgtaaattctggtgaaatgacaacctgtttctgatttctggataccaatttctctgcttcccactttttgcagctgtcgtgcctgtgctgaatcagagagaactgcttgctctgcctactttacactcaactcctccttacccctgtctgttgctaaggcagtgtttttataataattagccaaacttaccttcaatgcttggaaggttgcatttttcttggaatgttggctaccttgatttgcaattaagattgcttctgggtctttgaagaaactaatgtaagattagttgtggtttcaattttgaaatatttctaccactacttttcagtgttcctttgtagtttaaaactgggcccatctggccctatcttttgtctgactttctaaggaacattttggacttaatttttttctttccttctgtcattcaatatgacacttcatagtagcttctaggcagttggattaaaataatgttctctttataagtcaagagtacatatggctttctagtataagattgtaattgtatgagcttgtaattttaaagttgtatagatttataaattcttttttgttttctgaattagtttatataggttgttaatttaaaaacagaatctcgtaactgaagagactttaaaggacaagtactcccacatctcacccaagaacaaatgttcttccacacagtgcttgttttagcagttagaattcactctcccaaaacagcttgtttttgtccagtgtatttatttagtgagtgttgcttttctatttgaggatttacctcccatttttggatccagacatctaggtggtggtgatttctaaaaactagacacctgtgatgttaatgcacgtgaagcctgaataaaaggaagaccggaaccggcatggtgatgaggttgaggagtgtaaaactgcaaagtcatggctggctggctgtatttgatccagagtagttttattaagagttgggggatgggttctactctggctatggaagaaagtcagttcagttggctttcttcctttgtctttaggtaatgtatgctgctctgtgtgcaagctgatcaggcataccagaagaaatttaaaaaaaaagtctttaaagctcactacaatgtttctccaaactggaattttaaatagttttagcattatctttctcttataggaataatatttgaacactaaactaggcattctaaattcctgatgtgtgcaagtaatgaggtaaaatacttaggaaagttaaaatattttttctatataatccttttcttcattgtcttatttaaaatactactgaagtattactacttttagttttcannnnnnnnnnnnnnnnnnnnnnnnnnnnnnnnnnnnnnnnnnnnnnnnnnnnnnnnnnnnnnnnnnnnnnnnnnnnnnnnnnnnnnnnnnnnnnnnnnnnnnnnnnnnnnnnnnnnnnnnnnnnnnnnnnnnnnnnnnnnnnnnnnnnnnnnnnnnnnnnnnnnnnnnnnnnnnnnnnnnnnnnnnnnnnnnnnnnnnnnnnnnnnnnnnnnnnnnnnnnnnnnnnnnnnnnnnnnnnnnnnnnnnnnnnnnnnnnnnnnnnnnnnnnnnnnnnnnnnnnnnnnnnnnnnnnnnnnnnnnnnnnnnnnnnnnnnnnnnnnnnnnnnnnnnnnnnnnnnnnnnnnnnnnnnnnnnnnnnnnnnnnnnnnnnnnnnnnnnnnnnnnnnnnnnnnnnnnnnnnnnnnnnnnnnnnnnnnnnnnnnnnnnnnnnnnnnnnnnnnnnnnnnnnnnnnnnnnnnnnnnnnnnnnnnnnnnnnnnnnnnnnnnnnnnnnnnnnnnnnnnnnnnnnnnnnnnnnnnnnnnnnnnnnnnnnnnnnnnnnnnnnnnnnnnnnnnnnnnnnnnnnnnnnnnnnnnnnnnnnnnnnnnnnnnnnnnnnnnnnnnnnnnnnnnnnnnnnnnnnnnnnnnnnnnnnnnnnnnnnnnnnnnnnnnnnnnnnnnnnnnnnnnnnnnnnnnnnnnnnnnnnnnnnnnnnnnnnnnnnnnnnnnnnnnnnnnnnnnnnnnnnnnnnnnnnnnnnnnnnnnnnnnnnnnnnnnnnnnnnnnnnnnnnnnnnnnnnnnnnnnnnnnnnnnnnnnnnnnnnnnnnnnnnnnnnnnnnnnnnnnnnnnnnnnnnnnnnnnnnnnnnnnnnnnnnnnnnnnnnnnnnnnnnnnnnnnnnnnnnnnnnnnnnnnnnnnnnnnnnnnnnnnnnnnnnnnnnnnnnnnnnnnnnnnnnnnnnnnnnnnnnnnnnnnnnnnnnnnnnnnnnnnnnnnnnnnnnnnnnnnnnnnnnnnnnnnnnnnnnnnnnnnnnnnnnnnnnnnnnnnnnnnnnnnnnnnnnnnnnnnnnnnnnnnnnnnnnnnnnnnnnnnnnnnnnnnnnnnnnnnnnnnnnnnnnnnnnnnnnnnnnnnnnnnnnnnnnnnnnnnnnnnnnnnnnnnnnnnnnnnnnnnnnnnnnnnnnnnnnnnnnnnnnnnnnnnnnnnnnnnnnnnnnnnnnnnnnnnnnnnnnnnnnnnnnnnnnnnnnnnnncctgaaatcagaaatccctccctgcctctgcctcccaagtcctgggattaaaggcgtgcaccacccactgcccagtaggtaagcacttttctgggcaactataaggattagactttgaatccccatcatctgggatgggagaggcatgcatggtagtgcctataaccccctagcactgtggagttagaatttgggtacatcccaggaattcagttgacagccaatctagtcaattgttgagctcccggttcagtaaaagaccttgtctcctgtaagatggagctatagagaacacataacattgatttgtggtctctataaacatgcacacacaggcacacacactgcacatatactcacgttattcacaatttgtttacagacatacacttgccttttccccactaagatcaatggtgtaaagtcaaactgtacacaaattacttgggattagttctgtctgtctgccttttgatcagttagtctgtccttgatttatttggaatataagtaggtttcttggttcttctttgctttaaattttaatttttccctttgtttccattcttagtgaatgatataaataacattaacatttttcctaaagtaaaaactataaaaaaggtaaatttagttaaagatcaattcatttaagacctgttccacccaatttcctaccacttgtagggaacgcacacgcacatgcacacacgcacgcgcgcgcgcacacacacacacactctctcttgctttctattctcttctttctttctttctttcttttctttcttttctttcttcctttcctttcttacctttccnnnnnnnnnnnnnnnnnnnnnnnnnnnnnnnnnnnnnnnnnnnnnnnnnnnnnnnnnnnnnnnnnnnnnnnnnnnnnnnnnnnnnnnnnnnnnnnnnnnnnnnnnnnnnnnnnnnnnnnnnnnnnnnnnnnnnnnnnnnnnnnnnnnnnnnnnnnnnnnnnnnnnnnnnnnnnnnnnnnnnnnnnnnnnnnnnnnnnnnnnnnnnnnnnnnnnnnnnnnnnnnnnnnnnnnnnnnnnnnnnnnnnnnnnnnnnnnnnnnnnnnnnnnnnnnnnnnnnnnnnnnnnnnnnnnnnnnnnnnnnnnnnnnnnnnnnnnnnnnnnnnnnnnnnnnnnnnnnnnnnnnnnnnnnnnnnnnnnnctccctccctccctccctccctccctcccttccttccttccttcccctctctccctctttcttgctttcttcctcccccccccctctttctttctttctttctgtaaaattttagccaggcattggtggcccacgcctttaatcccagcactcgggaggcagaggcaggcagatttctgagttcgaggactgcctggtctacaaagtgagttccaggacagccaaggctatacagagaaaccctgtctcgggaaaacaacaacaacaacaacaaacaaacaaacaaacaaaaaacaacaacaaaaaaccaacaacaacaaaaagtagtaaaatttactttttttattttgttgtgtaatttttgcttttcttgttcactgggtagcctaagacttgtagagctctttctgcctttgccttccaagtgctgggattaaaggtgatagccactactgcctggctgtttgaatttggcgcatataattcttcagaatggtaattgtgtaagcatgtgactgtagagtgtgcttttactttagtaatttatgtgtatgagtattttgcctgtatatatatatatttgtgcactgtatacatgtcttgctcctgttgaggccaaaagagagcataggatctcctggaactagagttgcagaccttatgtgagctgctatatgggtgctagtaatcaaatgtgggtctttaggaagagcagccagtataatctttacctatgagctttctttccacacccagttgttgctaaataatttatctgttcagagtgatcctaacctcaaaggaatgttatttaaaattattatcttgagctttgatatgcctgctttaaagtagatcataatgtacatttaagtgggtagcatatttttctttgagttcctaatttttgtttatgtagacatcctccgcaatgttggcttctttttctccctttcttccccttctctttttttctgttgctagtaaggcactatacctagacacacacagttactatgtattgcaactctttgaacattattcagatggacttatgctggtagagttacattactttgttcatgaaatccttgtagataagactgtgtgaagtatagccagttcactgtttctgtcatcactgtagtcttgagttgattttgtaaaaacacaaaatcatactataaaaatggtgggaatcctcccctccctcccccaacatgcatacttttagaggcctactcagtggagaagagcacaatggtcttattctttgctattcaggaaggaactttacttaagggaaaaaaaaaaaagatttatttttatgtgaatttgtgtttgttagatcacctggacctggaattacagacagttgtgagctgccaagtgggtgttgggagttgaacccagttcctctagaagagcagccagttttcttaattgctgagctgtcagaactctattttctttcatttataattgtaattcagtgaattggtctgctaaatcacactcttgagattgtcttcatacaaaaaccttgtatttatgttttcattgacagtcactcatgtataattgacccacatagattgatcatgggcttattttttattttttggtttttttcgagatagggtttctctgtatagccctggctgaccaggaactcactctgtagnnnnnnnnnnnnnnnnnnnnnnnnnnnnnnnnnnnnnnnnnnnnnnnnnnnnnnnnnnnnnnnnnnnnnnnnnnnnnnattaatgatgtgcatcacccctgtctggcaggcttgttattttttttaaccgtagtaaatttctgcatgtaaaatttttgtttgttgcatatattcctggagaagtaaataagaatgaacataggatgttgtaaggtggctgttttgaaacatgcttacttggttccagctcttgagaatgttagcatattcatgtgagctgtccactccttgttctgcgtattctgtagattagagagcaaacagaaagcagaaattgtctaacaagaagtacattaagaaaagtgaccaggcagtagtggcacatgcctttcataccagcacttgggaggtagaggcagaggcagaggcaggtggacttttgagtttgaggctagcctggtctacagagtgagttccaggaagccagggctacacagagaaaccctgtctcgaaaagccaaaataaataaataaataaataaaaataaatagaaagaaaagaaaagtgattaatgtgctatatatctactttttaaactaaaaaaagatggaagtcctggtagtccagtataagtgatctaattaagactcatctagagggggctggagaggtggcttagcagttaagagcgcagactgctcttccaaaggtcccaagttcaaatcccagcaaccacatggtggcttgcaaccatctgtaacaaaaaatctgatgccctcttctggagtgtctgaaaacagctacagtgtgcttacatataataaataaataaatattaaaaaaaaaaaagactcatccagatttctacatggcatttatgatcctatttttcttgaaaagttgactgctctttttaaaactatttttagttactctacaaaatcacttgtactgtgtaaaattagaaagtggcctatcagatgctctggtgtttacatacacaattcatattggagcaagtcgaattcttgtaccattattaggatgctattatgagctcaggggtcagttcactgttctctccttctctccttccctatctaacactcatatgttatttctttagatgcatttatctttagtagttttcctacctgataataagccctgcaactggccagagagataatggctcagtagtttcatcgtggctcacaaccattcataactccagttcagagtatctagcaccgtttttttgccctccatgagcactaggcatccacatcatatgtacacatacataaaggcaaatactaatacacataagtaaatctaaaaattttaaagcattatgattttgtaaaatttggaaataaaagtcaagagaaagttctaattttctttaacactagcattaaaatggcaagcatctaaaactttacaagtctaggctcatcaagttcatgctaaagatagtgtactagttggttttctcactgtgacagaataccgtacagcaagaagcagtccatggaggaagggtttgtttggctcccactttgaaggtacagttgtccatcctagtggacaagtcctagcagcaggagttgaggcagcttgctagactgcatccccgttcaggaatcagaaggacacatgctagtgcttagcttactttctccttttcatgcagtcctacactccagtccttggaattgtgctactcatattcaaggtgggtcttttcacttggaattagtgcctcactgctatgtctggtggcttgtttcttagatgattctagatcctgtcaagttggtggcattaaccatcacacagaatacaaaatttttttgctttggttttgagaaagttcatttagccctggctcaccttgaactctgtaggtgagactaattttgaactctttgctcctctatctcctgagtgttaagattacagacatgctaactttaaaaaaaaagtccttctcctgattcttattataaaacactttagtgccggcattccctttgctggtctgagtccctgtatgacggattctcttttttacctgaaggtgatggacttgggtagaccagtactaaaatagctatagtacttaaaataataattagtgttttgcctgatcttacagtgttttagttaagaatcttgtatttcgggctggtgagatggctcagtggttaagagcacccgactgctcttccgaaggtccggagttcaaatcccagcaaccacatggtggctcacaaccatctgtaacaagatctgactccactcttctggagtgtctgaagacagctacagtgtacttacatataataaataaataaataaatctaaaaaaaaaagaaaaagaaaattctagctggaattaaaaaaaaaaaagaatcttgtatttcccctgttgttttggtctgtggagaattagcctttttcttaacccaaagattattacctagagttagtcccagctcctacatggcaactcacaactgtctgtaattcacacatatggttcacatgtctataagaaggctaaacaccaactcataaaaaattaaaaattaaaaaaggtaaaaatcagtagaatttttgcactttgaaatacttttctctgtctttgactttatttcaatgctagcaatggaaatcagggcccttgttcatgctaggtaggtgcactaccagccatacttacacacaggacacagatttataccaaaagcatggaattgtgccttggactctgagtgtacatgaggtgttagaagttgctcaaataaagggtttaatgatgaacaaggataaaacttgtatggtgcttttctgagataacacgaataaagaggctagtttttagaatttgttaaatctattgtgtgcacatgtgacccagaaaacctgatcaagtcattgcatgagttcataaattatttaggtataataatgaatcattaattaatgtaaatctagtttataagattaatgggaggggctggagagatggctcagctgttaagagcactgactgctcttctgaaggtcctgagttcaaatcccaccaaccaaatggtagttcaaaaccacccataatgagatcagacaccctcttctggagtgtctgaagacagctacagtgtatttacatataataaataaatctttaaagagtaaatgggaacaggagtaatttggccattcttgaagtaggtttttgtgcaagtacttattttgtatatgtagcataaaaaggaggaagattaccatcataaacagaagcattagtcagatcagagacttgagggttagagtgaggacagttagtgtcacatcttctttgaagaatagaaatggtgtttctcttgtcattcttttttgaaatcagtttccttttgaaaataaagtttcattttttttctttatacaaatgtagtcctatgcatttgaattnnnnnnnnnnnnnnnnnnnnnnnnnnnnnnnnnnnnnnnnnnnnnnnnnnnnnnnnnnnnnnnnnnnnnnnnnnnnnnnnnnnnnnnnnnnnnnnnnnnnnnnnnnnnnnnnnnnnnnnnnnnnnnnnnnnnnnnnnnnnnnnnnnnnnnnnnnnnnnnnnnnnnnnnnnnnnnnnnnnnnnnnnnnnnnnnnnnnnnnnnnnnnnnnnnnnnnnnnnnnnnnnnnnnnnnnnnnnnnnnnnnnnnnnnnnnnnnnnnnnnnnnnnnnnnnnnnnnnnnnnnnnnnnnnnnnnnnnnnnnnnnnnnnnnnnnnnnnnnnnnnnnnnnnnnnnnnnnnnnnnnnnnnnnnnnnnnnnnnnnnnnnnnnnnnnnnnnnnnnnnnnnnnnnnnnnnnnnnnnnnnnnnnnnnnnnnnnnnnnnnnnnnnnnnnnnnnnnnnnnnnnnnnnnnnnnnnnnnnnnnnnnnnnnnnnnnnnnnnnnnnnnnnnnnnnnnnnnnnnnnnnnnnnnnnnnnnnnnnnnnnnnnnnnnnnnnnnnnnnnnnnnnnnnnnnnnnnnnnnnnnnnnnnnnnnnnnnnnnnnnnnnnnnnnnnnnnnnnnnnnnnnnnnnnnnnnnnnnnnnnnnnnnnnnnnnnnnnnnnnnnnnnnnnnnnnnnnnnnnnnnnnnnnnnnnnnnnnnnnnnnnnnnnnnnnnnnnnnnnnnnnnnnnnnnnnnnnnnnnnnnnnnnnnnnnnnnnnnnnnnnnnnnnnnnnnnnnnnnnnnnnnnnnnnnactcaagacctggaagagcagtcagtgctcttaaccactgagccatctctccagccctgggcagttcttctatagaaataaatagtagggctccagatgcagttttttatgtgggttaagtctgagacttaactccatttgtcaggctggtactactagaacttgtattcaatgagatatttctttatccccaaggaagtactttataacaaacaaaaaaaaggttcacagtgctgaaatttgttaccattactttaggaagttagactcccattaagtgatgatttgttattagtctaaataatttatgaatttatgcaatgaccttattaggttttctgggtaatgtgtatagtgtagatgaaacataaactctctgtttttatgttcctcttagaaaactgttgtatatagtctgtgtgtgttggcaattttaagtcttttttttcttctggttaattggtttcacagaagagtagttactggttctgtgctaaaaaccaaagtgattatgtccagcataggcatggtaatagcactcactgtttttggtctaagaatgtgtgtttatgcatttcagttattttatataaatgagacctttttgtaagggatacaaagtgaaatggaagcagttgattttttttttctttgtcatttcactagtcacctacaaaagctgtatataatgccaggcattggaaccatccagactcggaagaattgcctggaccaccaatagcaaaacctcagcgtgtcacagtaagtaaatattttttctttctcttaaaataaattagaaattaatctagatagctattatcttaatttttgttcttacaagattataattgaaagctttacaaattaaaactttgtagtagctcaaggccaatgtaggttttatactgagacccaatctcagaaactaaacaacaaaaaaaccaaaccagagcttttaatcatgactcatgttttatagaatttatagtatttagggcttaagaaaaattattccttatatgaagtgttagtactgatatgtgtgtgtggtattatgtatgtttttgttttgttttggtttttgtttggttttttcgagacagggtttctctgtgtagccctggctgtcctggaactcactttgtagaccaggctggcttcgaactcagaaatccgcctgccactgcctcccaagtgctgggattaaaggcgtgtgccaccacacccggctttatgtgtgtatttttgtgagtgtgtgtacaggtgtgtatgtactcagtagaggataacttttatgagtaatttcttctagcatgtgggttctgtcaatcaaactcagcaggcatccttacctgctaagcagtctcattggccttggccttcaaggtcaaggtcaattttaatgacaaggtctcattaaatttggcttatttagctagattggtgagctccaagtatccaccagtctttataccataaactgctgtggtgctgtctgtctgtctgcctgcctttctttctttctttctttctttctttctttctttctttctttctttctttctttctttctttcgttctttcgttctcccccccccctttttttttttggtttaagagtatagataccaagtatccaaaccctcatatccttatgcttgcatggcagacactttacttactctcagcttattgatcctgagaatttataataaatctaggcatgatggccaatacctgtaattgtagtacttggaaggctgaagtaggtatcaccaccttgtcactaacaagtgctgcatagcaagacctcactctttctcccaaagctatatatagactatattctacaacttgtggacctttttttttttttaaagtttggggcctctgcctttttaagaattattttgtttttattttatatgtaagagtgttttgcctgaatatttattattgtatagctccttttttgtttggttggttttggttgtttttgtttttgttttttttggagacaggatttctctgtggtatctttggctgtcctggaacttattctgtagaccaggctggtcttgaacttaaagagcattctaagtgctgggattaaaggtgttcttcacttctgcctggtgactatatctgtatatcttaaagtgactttcattccttaatttgatttacatagagctaaaattacattcaattaatactttccaaaccttttgtaaaatattcttgctaggtatgctacccacaatctaggcaactaggagatgaagcccttggtcatcttgaagtaccacaggaatgagttcttagaacagtaacaaaaatgtgaggctcgagggtcatgtgtttgtgttgctaatgactgaacccaggccctgtgcacagacctaatgttcatcctcagctctaagaatggaggagctcttttggttttttgacaaggtttctctgtgtagccctggctgtcctggaactcactctgtagaccaggctggcctcgaactcagaaatccgcctgcctctgcctcccaagtatcaggattaaaggcgtgcaccaccactgccctgctagaatagaattcttaataaacactataatgttttttcttaagttgattatgaagtcaccatcatatatactagtaattatttgtgattctgacacacgctttgttctttttacaacttactatttttgttctgtgttgctttagtttcctatgcttctgtgattccctttgtcgtcgttttttgaagccctgtcttaactgcttatcaatgctacttatgcatgcagttgtggttctttattctgttaactgtcctggaagcaaagaaatgataggaaatgtgaagtttttaaaaaaccaaaagtatttctcaagtggttcttttgggtataaatcaaaatttaagtcttagtagtgcatggaatttaaattatttcttaggaactttcagcagcctccctcttccccctttaaaaaattttcatttacttttttaaagctaaatttgtcacatagacaagatgttaccttttaaaatatatttgcttagaacaactaatttaatacctttattaataggtgaggctgtcttcaaaggaaccaaatcaaaaagatgatggagtttttaaggctcctgcaccaccactcaaagtgataaaaactgtgacaatacctactcagccctaccaagaaatagttactgcactgaaatgcagaaaagaagacaaagaagtaagcagccatatactgtttcactgcacgtggatagatttctatgtgtaacaattagccttttgtcttaaacaaatatcactacattgctagccacattttgaaccacaaacgtaccttattctacttgtccaatactagtgattcaaaaacattttttttgttgccatcgaatgagtgattttataggcattttattaaatataatgagcctatagatttaaatatgctaaagttaccaagaggcgggcttatgtttttcttggcagttatatactgttgttcagcacgtgaaacacttcaatgatgtggtggaatttggtgaaaatcaagagttcactgatgacattgaatacttgttaagtggcttaaagagtactcagcctctaaacacacgttgccttaggtaagatcttaattgtactttctataatgttgtgcatgctatgtcattaagtttttcaactggatgggtttaaatttgttaataaagctaggcatgtaaaaaatcttggtgttgataattagccatatgcttttcagtttccagatgctacaagattaaataatatatactaagtaatctgagatgggttttttgtttttaatctcagaatttaagccactgactgatagattgatttgagtagtgacgtgggtcatcttttatatatggtgatagattgaatattgtatactttttgagttggttgtattatctatgatcagttgaaatatatccaataaaatataactacttctagttttaaaataatagcagtattatgactatgaaaaggaactagaattggtgattggagaaatacactacagaaactgtgctaatcatttttataaatttatgcccattcataatctaagccttggtacatgttttaaaattttggtttgcccgtggtttttatattttgtgttgtcaatattttaagccttctacttctttcttgtttggaattatggaaactacagctaatgtcttagcagtttttagctgccttaacatagtctgtttccttctagtgttatcagcttagctactaaatgtgccatgcccagttttcggatgcatctgagggcacatgggatggttgcaatggtctttaaaactttggatgattcccagcatcatcaggtaggtattttttaagtttctggggttgagaagtattattaaaaaaattacagtttttgtctatatcagaaaatactttcactagacattcatataagtgaattaaaggttgagtttattttatttgcttgataagtagagatgatagccatacatttttgctttatatatctcattttcttgaagacgtttttcttaagaaaagtttgtttatattaaaatactattcatttgtcagttagcatattatactgaatattttatactataaaatgatttcctttattcagaagttttaaaatattgtttgatagtaattgcatagaaaagggttttgaattacagccatggggctggagagatggctcagtggttaagagtactgactgctcttccagaggtcctgagttcaattcccagcaaccacctggtggctcacaaccatctgtaatgggatcggttgctctctgctagtattcgggtgtacatgcagatagaacactcatatacattaaataaatataaatcaatctctttaaaaaaatatagccataactttaaagtacttagctcattgttggatccggaaaaaagctgcattctcaaaagtaataaatggtaaagattaacgaaccaaagttaattcttaatgtcaccataagttagaaaaaaatagtcattaccaaacctgacagtgatatattgaggtggccttctatgaaaggaaattactttctaaatacaaattgagtggcacaaaattaatctaataccaattcttctgaaactaaaagttatgaaattaaagtgagcgaacattcctctgtacccaggttgtacttgacacagaataatgaggacaataaggcacaaggaatgtgttacttgctttattgactagttaggtatagtcttaagataaaactttttcttagtgacttcttaaggtcttaactgtgacattctaatttccagaaatacactttataaacgtttaatcagggggactgaaaagataattaagcaataaagatcctgatttggtttttacccatgtaagggagctcacaaccacctgtgactctagctccaagtttctggtctttttgagcaattacacctatatggtgtgtgtgcatatttctctctctctctctctctctctctctctctctctctctnnnnnnnnnnnnnnnnnnnnnnnnnnnnnnnnnnnnnnnnnnnnnnnnnnnnnnnnnnnnnnnnnnnnnnnnnnnnnnnnnnnnnnnnnnnnnnnnnnnnnnnnnnnnnnnnnnnnnnnnnnnnnnnnnnnnnnnnnnnnnnnnnnnnnnnnnnnnnnnnnnnnnnnnnnnnnnnnnnnnnnnnnnnnnnnnnnnnnnnnnnnnnnnnnnnnnnnnnnnnnnnnnnnnnnnnnnnnnnnnnnnnnnnnnnnnnnnnnnnnnnnnnnnnnnnnnnnnnnnnnnnnnnnnnnnnnnnnnnnnnnnnnnnnnnnnnnnnnnnnnnnnnnnnnnnnnnnnnnnnnnnnnnnnnnnnnnnnnnnnnnnnnnnnnnnnnnnnnnnnnnnnnnnnnnnnnnnnnnnnnnnnnnnnnnnnnnnnnnnnnnnnnnnnnnnnnnnnnnnnnnnnnnnnnnnnnnnnnnnnnnnnnnnnnnnnnnnnnnnnnnnnnnnnnnnnnnnnnnnnnnnnnnnnnnnnnnnnnnnnnnnnnnnnnnnnnnnnnnnnnnnnnnnnnnnnnnnnnnnnnnnnnnnnnnnnnnnnnnnnnnnnnnnnnnnnnnnnnnnnnnnnnnnnnnnnnnnnnnnnnnnnnnnnnnnnnnnnnnnnnnnnnnnnnnnnnnnnnnnnnnnnnnnnnnnnnnnnnnnnnnnnnnnnnnnnnnnnnnnnnnnnnnnnnnnnnnnnnnnnnnnnnnnnnnnnnnnnnnnnnnnnnnnnnnnnnnnnnnnnnnnnnnnnnnnnnnnnnnnnnnnnnnnnnnnnnnnnnnnnnnnnnnnnnnnnnnnnnnnnnnnnnnnnnnnnnnnnnnnnnnnnnnnnnnnnnnnnnnnnnnnnnnnnnnnnnnnnnnnnnnnnnnnnnnnnnnnnnnnnnnnnnnnnnnnnnnnnnnnnnnnnnnnnntgagttccaatgctacatagtgaaactgtgtctcaagaactccaactacacacctaacaaagatgtgtcaggtttggtggcacataagcaagtagatctccatgctgatttggtctccatagcgagttccaggccatccggactatgttgtgagaccctgtctttaaaaaaatgtcgttgaattaaaacattttttaaaaatccagcctttaagtccagcactgaggagggaggcagggataggttgacctctgtgagttcgaggccagctttgcctaaatagtggacaggaccaccagagctctgtcttgaaaaccttaaaaaaaaaaaaagggtatgcttgtttctttttaaaagttagtttatgagtgttttgcttgcttgtgtgtctggtgcttgcaagaggccaatagagttagaaatagttgtcagtgagccaccctgtgggtgcttggaatagaactggggtcccctggaagaacagctaatgcccactctttctgctgagtcatctcctcagcctcctagttaaatttatttcagtcccctgtattctgatggaaggcttaaattgtctatattttatggagggaaaattgtgttttgatacaaagtataaacatatttgttactttttttttttaaagaaaacaaaacttgacatacctttatgcacaaagaacattaaaggtatattgcaaaaggaaatatttataaattacataattcataaaaatgttccatatgtacctcatttaataaaactgttcaaagaaatgggtagcgaaggatgatagagaggaaagcacaactttaaatcagagttttatttatcaaatagctatgtttccctaggctattttgaaagagcagtaaatcaagcattatcagggtctctatcaaaaccatctataggaatattagacaatttagcttataaatgtcagtaatgtccttgtttctgaagttgttagtaattgctttcatgaatatttctcttttggggtctgttgaagaatctgtccctctgtacagctgctctcatgtacatattgagtagagaccgtttgaacatggatcttgatagggccagcctagatctcatgattcggcttttggagttggaacaagatgcctcttcagctaagctactgaatgaaaaagacatgaacaagatcaaagaaaagatccgaagactctgtgaaactgtgcacaacaagcatcttgatctagaaaacataacggtgggttgtaaaccttttatttttaagtaatatatattctgtttcaaatatacatgacaaggtggaaacttctctcttgaagtgtttaagtttgggttgggtttgggggacagataaaaacttcctttaagtctttgctaattattcttcctagattgcaagggattagcaggctgaaggataactaactaaatcactgccttcagccctgctgattatttcttctattagggctaaacttcctttattatatcaagaattagattactctctgttgagaagtggctttaggcttttttctccacttctctgctcattttttactttcgtaaagttggctcttttttaatcatactttgccttaaactttatactatagtgtggctcactgataagtatgtgggaaaattttcatgtttactatgttctgaaactataaatccagatggttagcactctaacttcaggctgttgaaactaatgaccgttgagtttgaacatttagggccactgacgttcccatactttcctccttgaagtttatcttactacattctttttgataggtcaatccaatatattgatttatagaaaagaaagtcgggtgtggtggttgcaagccttttaatctgagcacttgggaggcagaggcaggcaggtttctgtgagtttaaggtcagcctggtctacaaagtgagtccaagacagccagggctgagcctctgtattgccattatatattatatgaaactaacaaaaagtagattacttttaaatgaatttttttcatgaaagcaagctgtatagttaaatcaccgtttctttagtgtacactgattaaaattagtttattcacctataaaagcacatactgttctatttttgacttactggaatcttaataaagaaaaataaatcctaaaattaatgcatcagaattattctaaccttgtggtggcgcacacctttaatcccagcattctggagagagaggcaggcggatctctgagtttgaggtaagcctggtctacagagtgagttccaggactgtcagggatacacagagaatcctgtctcaaaaaaatcagaaaaaaaaaaaattattttacacctcagtattcattaatggtatttctgaattttagactggtcatttagctatggagacattgctgtccctcacttccaaacgagcaggagattggtttaaagaagagctccgacttctgggtggtctggatcatattgtagataaaggtctgtatacatacatgcatacatactgtagataaaggtctgtgtatgtacatgcacacacagagtgttatataacttgagtcccagtacttaggagacaggcaggtggatcttttgagtttgaggccagcctagtctacaaaaccagttctaggacagccagggctacatagaagagaaatactgtcttgtaagcacaaaattggagacactgtgatcaaggcaatttatagaaaaagtttattgtgagctcacagtttcagaggatgagtctagaatgagcatggcagtaagcaggcaagtgctggagcagtagctaagagttcagatcttgccgggcgtggtggcacacacctttaatcccagcactcgggaggcagaggcaaggggatttctgagtttgaggccagccgggtgaaacaaagtgagttccaggacagctagggcttatacagagaaaccctgtctcaaaaaacaaaacaaaacaaaacaaaacaaaacaaaacaaaacaaaaaatatataagcaccgaggagggagatgactgggaatgtcctgagtgctttgaaaccttagagcccatccatattacaggcctcctctgacaagcaaatatctcctaatccttcctaaacagtcacacagctattgaccaagcctccagatacatgatcctgtggggtccattttcattcaaaccattgtacttaactagcatcaggcataaaattatgttcccattccagcatatacgtattcatagcatgtatgtaggtaacgtttggtgttagctaagaaataattattgaactttcatatactaacttttgtctatttgttcttgcctagtaaaagagtgtgtggatcatttaagtagagatgatgaggacgaagagaaactagtagcctcattatggggagcagagagatgtttacgagttttagagagtgtaagtatgggcagctggacggggagttatctctacttgagattgtatgaccacttgatgttttaaatatcccgggggttttttacctttgcttatctgaattaaagttgtaaggattcttttcaaaaccaactgtcagtaaatgggcattttatcattttaagaatgtattgttttgctgtatatgctgataaatacttgtgatcctaaagttggaaaggaagattgtgagttcaaggccagcatgggccacataaataagaccctgtctcaaaccaaaagcttttatttgtatattattgctttaaatcaaaggtgcatacaagtttttttttttttacatgtatgtgactatagttttcttaatacagaaatctgtttttgttaaaacacgaacttgtttatcaaacaaacacagtcatgtcatggctttgttttagttagtacgcttttgtttgtttagtttttaagtcagattataagcacagctaaaaatgtttatttgactttggaaaataacactgttgggtgacagtacgtatgttttggtctttgattttaaatgacttaacctagttcagcacaggctacaattttactaacagtgaattttagaatttataattgctgattaagtagattggttaggtacttttaaaaacatggaagagctcttggcatatataaataaaattgctccttgtagggtgctgtttactaggttatacattatttctttatttaaaatacttaaatgactggctaaattggcacacatctttattctcaacacttggaaggcgggtgagtttctgtgagttaaagatcagcctgaacttcatagtaaattccaggatagccagggctatgtagagagatcatatctcaaataaataaacagacattaaaaagtaaaatatttcaaatatatttatgaattttaaagtatcaaatctgtatattggaggttttctgcatttcaaagtacttgacagttatgtgtaagttattatgagagtggtgtctttattgtatgataaattagtagtttttagttgggatcgcactgtgtaactttagctcacgtgtagttcactatgtataccaagatgtttttgaactcacagatgagcctgcctcatgagtgttgaaattaaagatgtgtgctacattctggttagtagttctcttattttaaatattgaagctataggttgtacaggtatttctctgcatcagggcttcataaactttgccatctatagcccatttttgcccagtaaattttaatgtgacccccaatatattggcaatactaaataggtacataatacaaaaagttttaaaattaaacccaagacagaatcaataaataacaatttggttttagttttggttggttggtttgttagtttgttttttgagacagagtctttatatatagtcctaactgccctagtacttgctatgtagaccaaccttgcctcagactcagggatgcacctatctctgcctcctgagtgctaggattaaagctcgtactaccatgcccagctattaaacagtaatttttaaagtcagtcattttgacacagtatataacccatgggtataccagtttgatacatactgaggaaaccattaagtctttgttatatttaatcaagtgactcattttataagaccagataattttgtgtatattataatatatagcataaaacagacgtgtttcttagctgtttgagcagtgtttgttggtgtgtgacatgacaacacacatgatgcaaaatgttcatgttgtgtcgtagaactaagtgaattcattaaatgagccatgggtgataagcatttctaacaacattttaggattcattatgcatttgatttttaatgaatttggttcattaaaaatgagaaattttctatactgcctgctttttcagtcctcgcatttaattacacctctgtaggtcagaactggagtttaagaaattgtgcccttagatgacaagatctgtttcatctttttatattttaagttatcaggtaaagtgtggtattatttatataaatgaaaattatggattgttagagtcattttatatccatcccttctaggtaacagtgcataatccagagaatcaaagctacttgatagcctataaagattcacaactcattatttcatcagctaagtaagttttataaactctcatttatttaaaactcaggaaataaagatgtattctattttttcttaaaatgttttgtctgttgagttttgtgaatatgtacattataggtaaaaagttaagagtgaagattcttgaggtaaaatggtttggtgagaattgtacatcctttatgttagctataatccaggacaaatgacttgttacaaggtgtttgtgggcagggcaagaagcctgggtactaggatggttttcatcactaaacaagtagatatatcttagcatatactaccatatatacattttttacagtgtatatataatacatgcaaagatgatgtttgttaatacattttaagtgattttaaggtgtatgtacaatatatataaaagaatcaaattctttaagcctactagaacattgcttagtatattgtcaatggtaaatattttaggccttttgtttgaagtggattgtaactccatttctgccacgtatttatatctcattttccagatctttgtctatctccctgactagccttcacaattaggctagtgctgccacctcagtgctctgtgtctctagtcctggttctgtctgattacaacagctgcttcttgctatcactgtcctagattttgctagctctgtcctagttctctggcctttatcttagccattatgccaccgggatttaactttctctggatctctgctttgaaaaactaatcttaagttgcaattctatatgacccttggctgtctttgtaaatttccttatacaagaacaactattttagtgtgaatggtccggtttatttgtgtattaaccttttatttggagagtttcaaattaagagacatatagactgaataatgtgataaactcttatacttagcttgaataatacatgggtgaaccttgtttctgtctataacctcatcttttgtgttattttgaagcaagctatatcatctccatttcctgttttaatgtaattttgttaattttatagcacattattatccttaacataagcaattcttccttatcaaggaacttccttgaagattaaatatgttttgcattgtattttatttggcgggtggtggttggggttggttgattgatttgtttgttttttagtagcagtagaaatggaacctatgcttataccagccaagtggtctgtcagtcctagtccctggttttttgtttgtttgtttgttttttcatttaaaaatattattcgtgattttaaagttgttttcttatgcttcttagtctctgagaattgccttagtaaagaagtatttaatgtgacatatttcatctcttgcatggggttttcttgtgaaatgtttgtagaagtggtgataaaagtcagaattgggttttgggaaatagcattcacctatagctttcaagaaaacacttatagatacttagtaatatttagcacagacagtttagttactaatagcaacagggaaatgttgtcaacatcctcaaacattaaagaagcaaattttttaggtttgacagtaaaagaacatctttctaaccaagaactgtaaaatattaggaaccttacaggatttcctcattgcatattaaaaataagctaggaatagattaaatatgtagaatttttctttacgggtttgatgtggtatgcaattcatgaaaaataaactgacaacgccagtttacttgatctgtgttagacttgaaaaaaaaatagtggatttgatggttgaaagatgccttggcagctggagcgatgactcagcaggtaaagaaacttgtagtatagacttgaccagaaaccatgcaaagctttaagacgtgcatctactctacaaagttgtcttctgacctccatatgggtgatatggaatctttgcttacacacatatcatacacacttattaaaaataatcagaatttacagatagacttgtgttagcattctacttccttgttagtgtgtgtcagacttgggaatcattggatgtagctgccagaagacctgttaatgttcctcaattaaaaataatgatttgtcttaacatatgtcaggcatttatttgatagtcatctttatcgagtaactttttttttttaaagatttatttatttattatatgtaagtacactgtagctatcttcagacactccagaagagggagtcagatctcattacagatggttgtgagccaccatgtggttgctgggatttgaactccggaccttcggaagagcagtcgggtgctcttacccactgagccatctcaccagcccctcgagtgacttttatatatgatactctacctgctaagaaagcattctcttatttgctaaataacaactaactggaaccgagaactggcattatttcttcagggtttatgggcgggagcatcatggtgatatattttgtatttgaggtatctgtaaaatgtgacagctcctgtgagtaacacgtttgttttgtgagccccccccccccattgttgtggtgctaattgttggtgtgagacaggatgttattcttttgtcccagctagtaaaagtaaactcctaggctaaaacaaccctttgccttagccgcctctatagtggggactgtaaacatgatgcacaaacatggaatgaacttacaaccttaactgtctttagagagaaattgtaatgatcaagtatactaaaattttgcagttagcaaaattattagcatgtgtggtacattaacattgtaactttaaaaacaggaaaacaaaacaaacttagtatttttttaggccccagttaataaattataccataattatttacattttattttctcttaagagcattacagcattgtgaagacctgattcagcagtacaaccgtgctgagaacagcatctgtgtagcagacagtaaccctctgccttaccagaatgtaactaaccatgtgggcaaagcagtggaggactgcatgagggctataattggagtattgctcaatttaactaatgataatggtaagtaataatttcttatgttgcatttgcagataagctattctgtttttcatgtactgatttacaatattccttaatataattaacttgctcctatagtcataagctacttttagaactgcctagtaaattagtctttgaatatcaaaactctgtatttcattaaagaaatagttattttaaaataaaaattttagatgaatacttcgtagccgagtatagtgtttacacctataatcctaacttggggcaaggcaagggaggctcagtgcatgaggttaaagtcagtctgaactacgaagtgagtcaagcaggattagagtaaaactaggactaagaaaagaaaggaagggaaaacaaaacaaaaaaatcattttaatgtgattattagtgttatcaggaaggtttttgtttgcattcttcagagtggggcagcacaaagacaggagaacaagaaggactcataggcacagcgatgaactgtgttcttcaggttccaaagtacctacctcaggagcagagatttgatattcgagtgctggtaagttcaagtgtggtcactttgtaattgtacttatcatgtctttagatgatgaaactttgttttaatttggatttaagaatctgtcatttattataatctgttttgttttggtggatccttatgaacatcttcatatttttctgttcttaaaacatttttcatagacatagaagtataaatgaaatggtggttgataactcagggagctaagtggcttgtgcctgtcctcctagcactgtaaagagtagagtaggaggatggccgtgagtcaaggccaggccagactgtgccaacaataagacaggtctgcggttcatggaagccagctaaaagaaagaacagtgtctgtcttacatagtggttgcaaatggaaaaatgctgcttgacattttatttacactaagttatatatattacattcattaagttcttgtgtgtgatgattatatttttaaatgttttatagggattgggtctactcataaacctggtggagtatagtgcccggaatcgacactgccttgtcaacatgcaaacatcctgttcctttgattcctccttctctagtggagaaggcgatcatagtttaaggctagccggacaagttcatgctgttcaagctttagtgcaggtgagcagcagtgacataattgcatatcgtatggattctataaggtccactgtgcacttgaagtcagctgagctcctcagcctgacggtccagattccctgacagggtccctaggatcttcagagggttcttggaccagttttgagaaatgttcttttgttttgtcaaagttactatgctgtacatactgtcttcaaagtctgtagatttagcacaccttttaatgtctgcatttgatacttggataattctcattagtaacttggtacttttcccaaatagtgtgattgggtatattaggtgctttttgtgttgaacatcatagcaacgaaaagaaaaagtcattgaagagaagggatttggtatgtccgcttgtttgtatggatacctgatagatagtgaactatgaatagtcttccttacacacttcctccagcgataagaatgctaaggatgtaaagacctagttctagagcttctatatttattgtttatattttagctttttattggtcttccggttaattcatccagtatgtgtaggtttgtctatttctttggtttttaattttagaaatgggtagggatttttaaatttgcttttgttttgtttttgtttcccctttaatttccttggaaatgttacctggattaaagataattaatggagacttttaatcttggaattacaatataaatcattactagattacttaaaaacagtatttgtgccaggcgtggtggcgcacgcctttaatcccagcactcgggaggcagaggcaggcggatttctgagttcgaggccagcctggtctacaaagtgagttccaggacagccaagactacacagagaaaccctgtcttgaaaaaccaaaacaaacaaacagacaaaaaaaaacccagcatttgtacttcagttttggttttcagtaaatgtaggacaaaagctttttaaaatcagataattcttatttcaaacactatcacactatgtacatgttagtacttgatgtctactttttttttttttataatatctttctagggactcctgtgtccctctcacttctttaattataattgttgtacatgtgtttctttaattacaattgtaagtttatagtgttgttcatgtgtgtttagtgctaacctcaggattgactaacctcgtagtatctttttaatgattttcaaaaataatttttatcagctatttctcgaacgagagagagcagcacaattggcagaaagtaaaacagatgaattgattaaagatgctcctaccactcagcatgataagagtggagagtggcaagaaacaagtggagaaatacagtgggtatcaactgaaaagactgatggtgcagaggagaagcagaagaaggaggaggaggatgaagaacttgacctcaataaaggcatgttaacctgaagtagtaatagagtcacagtgagaataatggtttttgagttcttttttagcatttgattcgcatattgttataatttagttaatgcctttatagtttgtctaggtaagctttggaattacagtagttcttctgtctttgagcatggtgtgtcagtgagagatcacttttcttgtttggtgcttctcctttactctgtacagagcagcagctaagttgggcatgagagtgcacagcttaattctagcatgaggtaggctgaggcagaggaatgccacttggaggtcagcctgggttttttcaatgagactatgtttctaaagcagaagggtatgaatgtctgaggttcttttatctgcctcaccttaaactgaggcgttccatcaaaatttacagggagtagttctcagagcttactaggcaaagagtaataacatcctagctagaggcaataaatatccttactagtgaatttattgactacctactgtttttacgaattatatttgctgtatatatgtacattctgcataataactttttgtaactaaacctctgagattttgggggtttcttgtttgatttattgagacaaaaatctctatatagctctggctgtcttagaacttgttctgtagacctgtctggcttgtaatgtccaagaactccctcattagtattgggattaaggcctgtgctaccactgccccataaggctttgaaatttaatatattcaacactttccacttagattgatgctgagcctgttttctttctgttcggctattccttccctaagttctgatactcggtctcttacttgaagacctgtggttcaatctatcttatcaacttatttcagttggatgcattttatggcatttgttagaactatgtttcttgtttttatagtcacatgtatgtatgtgtatatatatatatgcatatgactgcatataggcacttcatagtcattttgtttatctgtttgtgcattgatgaatccctttgggttgttttaatactttttcactagtacagtgatattaattgttttccagtgtggtagcaccagcccatcaacaatatgtgagggttccagtttattcacaccttcaggactaccttgaaggatatttttcttagtcattttatttgatgaagaactttttgtttcatttacagctctctaaaaactgattgtttgtaacatctttgttttttggtctttttgtgtatttgaagaaatgtctatttgggtctcatgcctactttttaatctggttattggtcttttattatgaaattgaaagaattctttataaattctaaacatcttaccagattaatgtttatgtacttccacgttgtgaactgtcttccactttgttattggtgaccttctaaaaaccaatcttttaagtatgttgcactttcgtttttatatttgggtcacttattcttttttttttttaatttgagatactgaattgtacatgcatcatttttagtagcttttaaggtgataacagtataattgatgttatggggtctatatcagctttgcactgtaataactacttatttaactgttttcagcccttcagcatgctggcaaacacatggaggattgcatcgtagcctcctacacagccctgcttcttgggtgtctctgccaggaaagtccagtaagtagataatagttcagaagtgcctcttgtatctttgaagattttttgcaacagcttcatgccattaattaacctgatgcacttagtttaaaactttccctgttcatacatgctttttatttcagaagagcggctgactgtttagacagttttatttatttccctgtagaagaaaatgtcaagaatatttcaataacttcctagtggtttcctttaaactttttaaaaatagaatgtgaacatctttatttcctttgcattacaggcttttatagaaagatcggagatgtagtggcttgtttgttggtctttatgattttttagaactgatatatctgtcatactcaaaactgtttaagatgttaaaaagcaagctgggggagggggcctcaggatgtaactcaattactaatgtgcttgattagtgtgcctgaagccctgggtttagacccttctgccacgtaaactggttatgacagttatgcctacaacccagcatttgagagatgaaggtagttggatcagaaaaattattcttggcccacctgggcctagagacctggtctcacaaaaacttaattagatacttttaatgtcataccaaaggatttacatacaagaaattaaaatagtttgggatgttaaagactttaaaatatttcttgacctttttaaggatacattctaaagaaagaatgatttttgttataacagggaagttcttggtatggatgattaagtccctgctgttacctgtagttgatgtaaaagaagggagggtttaaaacctatgctcagctggccaagtcaaatttggctcattttagtggcgcagtggagtaacttgtcctgcacaggttttattgtcctttttcttggttaaaagcactcagcatgggctggagattcgggcgcagctcttaaaagcacttgatgcttttcagaggattgggagttcggttcctagcactcatgtcaagtggcttataaccatttatgagatcagctccaaggtatccagtgcctctggcctctaacaacacctgcactgtatgcacaaacccacatgcgcacatatatacacgcatatacacatatatacacatagttaaaaaccgtcaaaataaaatatttttatgtctataaaagcacttgtcatggtcataagtgatcatacttaaggtccaatctagtcaaataatgtcccacaggacctcctcctcattttctttttaagacatcatccttggacttcttaaccatctatctggctaagcattgggccacatgcttcaggctaggaatatgttggtagcttatgttcatcaggaattatccctgagaaatatgtgtctatttaactctgtagtcacacagaaggggaggttataggtattgggacagtctgttgccattggaaaaaacaaatttgaacatcaaatccacaatgtgaacaggatcttggaagcactgttagtgttccctttggaatatgtgccacaggtagtagtaggtaagtgaaaggtcagtagtagttgcctttatttctaattgttgtgattaatacattgggacagtcatgtttaagtgtattgataatagatcttgaagttgtattagtctgatgtgtgatcattatggataatctgtagcttttgtgtccctaaaaaggggtttctgaatttgttgacagtattgtggagttgttacagccacagatatggtatattatggcatattagttgttttgtcaatccttataattagaaaactagatattaccacaagtacaaagtgaattggctttcccattgtggaagtggaagagataaagcacacatataattacgggcagtaagctgtccctgttctgtggccccatgcttaggaagtgtaagaacgtctgataccattttctgtttacctaccttgactaccaatttgcactcactaccaatttgcactcactaccaatttgcactccctgctgttgttggttcttgcctctctgtattctttgactctagcacagtttcacaagatctagctttcttaatttatctctgtcttgtcaacggcaatggaatggtggattgacttgtcactttaagaacatacagttacgcctgcttctcttgtttaccaatgccagcatgccttttggatagctgttatgcttttcaaatagtccatgctatatttttcctctttgaacctcctgtactatgaatgttgtaatgtcctttccatggccactataaatgtctagttctatatccaagtaaagaggaatttgaactaatgaagtgctttcattcacatcatgggagctatttattattgtagagacatacttttttactgagcagtcattcagagttacctcaaccattcttttctccaccattatggatgtttacatgtgatgatgattggactacttttgtagatcatggttattttagcaggcctttaaatttaaacttctttggatggatgttttgtctgtataatagttttctttttattgctgtaaaaagatcatgaccaaaaggacttggagaggaaaaggtttatttcatcttacagtttatagtccactatgatgggaagttgccagaaactcctaggaatcctgcttactggcttgctcaactttttctacaatctaagaccacctgcctagaggtggttgtctgccccatcagttatcaatgaagaaaacaccccatagacttgtgtataggtcaatctgatggaagcaattcaattggtgttctttttctcaaggtgactctagtttgtggcaagttgacagaaaactagccagcatattctacatgtaagtctgtacatggagtgtcttgtgcctggaggccagaagggtattagatccaatggaactggagttaaagacaattatgagccattatatatatgtagatgctgggaatcaaacccannnnnnnnnnnnnnnnnnnnnnnnnnnnnnnnnnnnnnnnnnnnnnnnnnnnnnnnnnnnnnnnnnnnnnnnnnnnnnnnnnnnnnnnnnnnnnnnnnnnnnnnnnnnnnnnnnnnnnnnnnnnnnnnnnnnnnnnnnnnnnnnnnnnnnnnnnnnnnnnnnnnnnnnnnnnnnnnnnnnnnnnnnnnnnnnnnnnnnnntttcctggaatttgccccataatttatcacaaatgataagttttaaagatttagttaatttttgtcttctaatttacctttgtagcatggagaattttctttcatctttctgttttataagcacctctgtgtgtagagtctgtctatatatttaattaactgtgcagtttatttcaaacctttctctgcattttcaaaactaaatattcacagatgtttctttgtacctttggctttggctagctttgttgtttcccctttgtttctgtgggtagggtggtatggagtggggaattgacccgaatgtttctgcacaataggtaagtgaatgtggactggaaatgacgtatgaattttggggtcctttgtagatgactacgggatatgtagcagagccaacagcatcaagtgagttacagtatcattttttaccagcttgactgtttttaatctgtttcttcagatcaatgtaactacagtaagggaatatcttccagaaggagatttctccataatgacagagatgcttaaaaagttcttaagcttcatgaatcttacggtaagtaacttttattgtatattgcagtttatatgagtttttgattattttccagacaaagtcttaacactgtagcccaggctggcaatccacatgtttcagccattggaccagtgggacctggctagtttatgtgtttttcaatttaaatgtaatacatcgaaggtgaaaataataatcccatagtgttgttcttccctgtggcaaaatagttaacataagcagcttacagaaggtacattttggtttatagttctaaatttttgtgtgtgtgtttttttttctgtttgtttttgtttttttgagacagggtttctctgtgtagccctggctgtcctggaactcaccctgtagaccaggctggcctcgaactcagaaatccgcctgcttctgcctctcaagtgctaggatcaaaggcgtgcgccaccaccaccaggctagttctaaaatttttagtcatgtgtggcaagagcagcgtggaagagcagagtggccagctaatagagaatgcctgtgtatctgctttctccttttattccagctgtgcttctaggctgtgggatgatgccacccacaaacagaaaactattgtggcagaatgttatattactaaggcaatgatttaatttcagtgtactctttactacgtagactttgatacttttttttgtttaccattttgttaagtattaactctaatttctctccttcccctcttagtgtgctgttggaacaacaggccagaagtctatctctagagtgattgaatatttggaacattgctagctgctttacctttgcttcaggtgcttggtaatgctgaagctatccttagacaaagaaaagacatgaaagaagtccttgaagatataccaagaacattcatcagtatcattcattcgtgtttggatttttatgatcacccgatttcttcatcatgcattctgcgtttgctaaatgacagttactacatcaatctgcagctatcaaaaatgagggaaaaggttcaggctgttaacaatcccatgcagtatttaaatacacttacttggcagagtctatacctgcccctgtttccttgctgtatttcaggcaaggtttaaagagggcaatttgtgctgctgttagtgcaactgctgtgtatgttgagccactgttgtcatgccagtcaggtgcaaaggcagcttagctactgaggtattgaatgttctgaggacattctagacaacagcttagatcctttttcaggctcatttgcttttgctttttgttgaatgattccaatcgtaaataaagcttttaataattttgtgaattttttggttgttgttccctgaactactgtctatatttaaaatgagatggaatccaaagacacaagggattaatagtatatttttttattcttgattaggtttgggtgttgaactatttttcacttctgagaccatgaccatattcaatgtcataccattatgtgtcatagctataggcacaagaaaacaaatagcagtttgagggaatattatgttatataagataatgtgccctgttaaaggattaagcaaaaatagacaaacccagggtagtttacacttaatgctggggaggctcttgaaacattgttacgttttgagggacgttctctagatatattttctaatgttcagttcagtaaatataataaggaagctaaaacaccaatgtggaatccgtttttccagatagcgtgtatattcttctatagagtgacaggatcaattgcataagcgcaaagccttaaaattgctggtgtagagaagacccttttttattcagattctatgttcatagagcaattgtttagaaaatggttgtggaacacacagaacatggtttatagggtaaatttcatagattgttttttctttttttttttttcttttttttttttgtattgttcagaccactggttatacattttctcctttttttattaattggcctgaggacaggctttccagagatgtttcattaatacttttaattacctttcagatagttacatcatgtttcttcattggatttgtaaaacttaaagccataaaaatattagtttggtgtgtattggggaaaatagctaaaagtctaactttgactcattttagactttgttatttccttgtataaagtaacaaaccggggctcttgtatccgtgccagctgtaatgtttttaaatgcagtggctgccttctattgtcttcctatttttgataatgcagattgttgggaaatctataaggaagtaactgactctaggcaaattgttttcttcctcctacccgcccaaccccctacccgtccgtcaccttttaggaacacagtatgccagtgtaatgtgggaaccattgagactgtatttgccctgagtaccaaactaatttagtgaatttttttttaaacatactggtaaatgatgtccacaaatttccttagatatattttaattaattgtcttaaaatacattgatatttattaatcattggatttggggacagatttttgactgtggcagatggtagggaacagaacagtaaacagttggatgagatcaatcagggcgaattacatttttctgttacactggtgatcatttgagaattgatttacctcagtgtttaacagtttttgttttgtttttaaaatactaactaattgtcaagcactgatgagatgcaggtttggtggggtgggctgtgaggaagacctcaccttaccaactgcagtgcgtctctgtgttttagcctcagagaactctcattctagggtacttgaggctgacttgcaaagtgactaaagttttaaggtaaccttttttccattgtaaatacttctgtaaatactaccagttggatattagaacagtaggatacttttctgaatccaatcctatttttattttatacagtatttctcagctgtgatctttggagcaaaagccaacggcaggaaaaaatagtttgtaccagtttcatgaagtatgtctttgggtttttgtaaataattttaactcaaataaaattgatactttaaatacacacgttgtctttaacataagtctattgacctgttttggaggaagaagtctcagaacttgttaaggccagcacaccgtgtcatttgagcataagtgtccaatttttcttaaatattttatatacttgtaagtactggtctgaatggatgtagccgcttagcactttgggctggttagggatggtggttttctgagtgtatagttaaatccttagaatgccctctatgttacttgaaaacttttggctttctgaatatgacggtaaatttctttgcttttgaggtttgatagccattttttaagcttttaacttttttttttcttgttagccttaaagatttttaagatttacaagtatagtctcaaccttgccttacttgatttagtcgcaagagtagattacaggattttcccctgaattttgcagttcctctccccatttatacacatacacaagtgtaaagccacctgtgagagtggacaaatggtgcaggtgctagacttggaaagacctaaatcacacacgtggagtttgattcccagctctggtagttgctgttaagttggagcaaattctttttttttttaaagatttattttctgtgtgtgagtacaatgttgctgtcctcagtcacaccagaagagggctttggatcccattacagatggttgtgagccaccatgtggttgctgggaattgaactcaggatctctggaagagcagtcagtgttcctaaccaatgacacatctctccagccctgaagcaaattcttaaaactataatttacccagtttccttcattgaaaaatgggagacagtacagacctacctgatggttgtatagattaaatatgtgtgaaacattattataatgctccaaatttaatgtttattagtaagtgctagtttttacagttttttttttttccttttactatttctctgtaaaaaggtaaaaatgctctggaaatgaaatagagtgcttgtgactattaagggcattatatgtaacactggtgcctcacatcactgcagttgatggtttgtgcttttgacaccagattctccaaattactatttccaaacttggccttgttaatctcttcatgatgaatcataaagcagagggaaattgagcaaactttaatgctttctaaaatgtttcaggtctttttttttttttttctcccccttagaatgatcaaaaagaggtttggacaactctgttgatggcttccagatggagatataattaagtaccctatgtagaatgtctttgaacaaactcttgagtgttttggtcaaacctctttctctctctgacttctgtatatgtgtagtttgaattccccaagtgccatgtgctgctttaaggaatgttttcattctacctaggttgtacatctctaagaatttgctggctaaaatcatactacagagagtacatatgccaaacatgaccagaatgtctattgataatgactgttatagtgaatgtagacactgaacattccattgttaaggcagagattttgagattgattcaggagatactaaatgaaactacacggttacaggatttgttgatttagtagtttgtggtgaaggtgggtatcatcatgctcagagcaaacagcacagaaactgtagatagagcttgagttgctagagtagtcaaagcagaacactagacagaaggagaaacagtaacaaaaactagcaagaaatagcaaaatgggcttgtgtgagttttcctctggctctcacaaaagtaaaacatatcagaacaggaaaagtaattctgtctctgcaagagaaatagccaaagatgtcccctaaatgtcgtggtgactaattgtattaactcaaaactagttaaaaggtgagactgcgaaacaacctagagttgctgaatttaaatgacacattaagccgggcagtggtggtgcacacctttaatccagatacttgggagttcgaggccagcctggtgtagagtgagttccaggagagccagggctacacagagaaaccctgtctcaaaaataaacaaataaaagacacattaaagtggaaaaaaaggaaaaagtaaaaatacacaatgcaagtgctaatgaagtattgatgtaagacataatttagggctgagtaatgtatttctccaagagcattttgtaatcacgaggtgtggggtgtatacagaacacaacatcctaataccacagaagtgtttataagtatgtgataataacaatcatatcagtaggtaaattcacaaccatagtttcagattttaatacaacttcagcaagtaatagtatctcacagttgtgaacagaaaccatgaccaaggcaactcttacaaggacagcatttaattggagctgggttacaggtccagtccattatcattaatgccaaagcatggcacatccaggcagacatggaacaggagctgagagttctgcatcttcacctgaaggctgctaggagaatactggcccctacgtggttagaaggagacagaggcacacttccaacaaggctacacttaagagtgccaatgagccaggcatattcaaaccaccacattctacacatgagtctaagggggctatacctagtcataacataaaaaatatattcagtccagctttcaaagtccccacaagtctataacagtctcaacaatctttaaacgttcaaagtctcttctgagattcatccacttaactaatccccaatgcaagaccggaaagcagctgggcaaactccacactctgcatctccatggctgatgtcaatttggtcttcacatttccaactcttttcatttttgttgacaaactttttcttggtctggttccactacctgttaacagctttcttcagcaagtatcacatgactctggcgtctaacatcttgaggtcaactttacaacttcttgtttcaacatctgggaactacgcatgatctgacctctccatctctaccctctgtagcactctggttgactccaatccactgctgctgctgtgcttggtggtcattccatggccctggcatcttgaatatgctgggctcttctgctgcaactagtcttcaccaataacctctcataggctctcttcatggtcctcaacttctttccatcaccccttcagtcctgtgccatcaactgcaactgagactccacttttaccaatggccttccatggcctctcatagtgccaagactcagctgttcttcacgtcaccttcataccttcaaaacaaataccacctgggtgactcttacatgtttacaagtccagctgcagcagaaggtacaaccttggctatctctggaacacagctttgttatggtctcagaacacacttcctagaagattttcatctcagtgatactagtctcttcttcatctctgctaatttcttagctccagctaaccagcttcaaattatctcagaaagtcacttttgtttttgattaacaaccagagccacatggccaaagctgtcaagttctgctgcttgctgnnnnnnnnnnnnnnnnnnnntatcaccagctttctgctttccaactacttcactgcctaagcttggctatcctggaacttgctctgtagtttgaccatgaacacggagatgtgcatggctgtgtctcctgaatgctggaatgaaaggtgtgtaccaccactcctggatttttttctctacttggaacttgctctataccaggctaaccttaaactcagagatctgcttgcctctgtctcctgggattaaaggtataccaccatgtttggacctaggcttagctgagtgggatcttgtcccaagatgaccactcccttaatatgtttatcttcttgaacataggattcatcaccattttactttttggtgccccttttttacttgaaccatacattttacatcttacctttctcagcttgctccttttcattaaaaaacactcttcaccagactaaaccagagaacaaagcctctgctggactcttgtgacttcctttaatggaattaatataaatacacctcttaaccttagccttgagagaaggcaaaaagcagtcacattcctcaacaaaataccacaaaaacagtcttcaggccacatactgaaattcttcacttgaagccacttgggtcaggtctgcacaattcaactctctctcagcaagggagtcttcaatatgcctactaggttagccctacttaaagcattcctctgctttccaaatccgaagtctccaaattcacattcttccaaagaaaagaatgatcaggcctatggcagtaatacccaagtccctggtaccaacttctgtcttacagttttcattgctatgaagagacaccatagccaagacaacttttataaggccaacatttacttggggctggcttacaggttcagaggttcaattcattatcagtgcaggaacatgcatggcagggtccaggcaggcgtggtacaggagatgctgagagttctgcatcttcatctgaagattgctaggagaagactggctcccacgtgattaggaggagggtctcattgcccacctctacagtggcacacttccctttatttagcaaagccacacctactccaccaaggccatatcgcctaagagtgccactcgctgggccaagcatatttaaaccactataaatagcttagttttgttattttttaaatataagctggttgctgtagcacatacctataattctagctactcaggaggctatgtcaggccaattacgtaagtttaggagttaaaaggcctgtttggacaataacatgtctcaataagtatgtaattaaatgtgaagttacagaaaagttgagtggatgagttgccttaatctaatattcagaaaaattacattgaacatagatttttgtattgcatatgcaaatttcaccaagataatctgagagctcataaagcagacttctatgcatttcagatgactgaaggctacagagaatatacctgtgaatcagcaatcaaaaatcagaacaggcctggagagatggctcagcagttaagaacactgactgttcttccaaaggtcctgagttcaaatctcagcaaccacatggtggctcacaaccatccgtaatgaaagctgatgccctctgctggtgtgtgaaaaaacagctatgatgtacttacatgtaataaataaatcttcaaaaaaagtcaaaacaagcaacaattgcaaaccatattcagatattaagcagcatgggccagtgagtaagtaaaagcaagaaaagatcgtgccaattaaaatacaatacattggagggtttttttttttttactttgtttattgccacattaaaagcagtacttaaaattaaggctatcattgtgaacctgaaatgaaaagcatgaagtaatttaaaacccagtgtaagtttgaagaaagaaaaattagattagaaatcagcataataaacttgaaaacaaactgaaaatgcttaaaaaaaaaagttgagcccttaaaaccaaaaactgccagtgttgggaatgaaagatgaaataatacagagcctatggatattcaaaagaaataagatgttacaaataagccaaaaatctttacaactaaaattttagaattaattgagaaactttgaaaaatgacaaggtcaggccacattctgtggtatgtatgtgtaagcagtatttgggaggtggatgcaaaagaatcaagtttcaaaggctgtgtttagggagatagctacttgagacactgtcacacaaaaattgtgtgtgtgtgtgtgtatgtatgtataaagtaaaaaaggaacattaaaaaccaaggcaacatgtccccaaaggtactagttccacagaaatggtttccagtgacagatgaaatcgtagacaaagaattaaaaggataattataaatacatccaatgaagtcaaaagaaggcacaagtctaagaatacagtcagctgactgaaatgaagttgataggagttattaatgcagaagtcaatgtcgagctagaaagattgaagaattgctagaaatagacagtaaattaaaaggttttagggagtcacagatagaatggatcaaagattggttcagtgttggggatagaaggcaaggtagatgaaatgttcagacaaagataaagtacaaaataagatctatggggcactatctaaagaccaaacctataaattctggacctgggaaaatgagaatttcatgccggaggaatggaaaacattattttcaagaacacaattgtgattgaagtttccttaaacctaaagagatgcccgatcaagtacagaaagcataacaccaaatagataagaacagaagaaaccttcctgtatcatagctaaaacactaaaatacacaaaataaagcattgagagcttagagaaaggcaccaagtcaaatataaaggcacaccccttagagtagcaccgtaccgctctcaatagaaaggttggagggcttgagacgacgtattccaggctctagagcacaactgtcaacccagactactatacctagcagaactatcataactgaagaagaaaagagctttctgtgataaaagcagactaaaggaattcatgattacaaagcaactctacaaaaggtccttgaagtcctctagactgaagagaaagataaacacatcatggaagctacaagaaaaaccaaacaaaacagcaaatgaggcaaatggttagaaagtaatattaagagatagattgtgtggcgcacgcctttaattccagcactcgggaggcagaggcaggcggatttctgagtttgaggccagcttggtctacaaagtgagtttcaggtcagccagagctacacagagaaaccctgtctcgaaaaattaaaaaaaaaaaaaaaagattggtatatttggttcaacaggcaacaggatccatctattttttatctccaagaaatgtacctcaccatcagatgcaactttagtataaaacaaaagaaaaagatattctaagcaaatgctctaataggtaacaaaaattgacttcaaaattagaacctaactgaggtcactttagtgtctccccaattgtttgggggcactgtgtactttgagctagcctggaactcctgtttccccttcccgtctcacgggagtgctgggattgcagatgtgtgtcactgcatctgactttttgacatgggttctggggagcaaccttcagttgtaaggcttgaacatcaagcatctttactccttgagccatctggttggctatcaagacatgttaaaaaaaatattgatggaaacatcaggtaggtgggatacagcaaaatggggaagcctttgctatagctctcagattgttaggacagtcttataatttgaggtgatggaagccaggggtctgtctgtacattacacattaatttacctaatggtcacaggatatgtggtcacacacagagattggctttaaatagctatttttaggaaataaggtctctcagaataatttggctccaacctgtaacattccaactccccacaatcatggacattctaaatagtcaatcagatgtgtagaatgtttaacacagatacagtgttctcttccgttcctgagaacttcagttcacaaatctcatatgagaagaaagaagctaaagtgctggcagaagaaactttcctctgagaggacagggttagccagggccagaatccatggcaggctgcaaactgtcagtttgggagagtaggcctaagtttctgttttccagaatggaaaaagtccaaagcaaatcgattctaggaaaacccacccctcacggccagccaatcaggaagttactccaccacttagcctgagtcaacctcatggacagccaatcaggagctgtagaagctaccccaccaccaagtataattagcaannnnnnnnnnnnnnnnnnnnnnnnnnnnnnnnnnnnnnnnnnnnnnnnnnnnnnnnnnnnnnnnnnnnnnnnnnnnnnnnnnnnnnnnnnnnnnnnnnnnnnnnnnnnnnnnnnnnnnnnnnnnnnnnnnnnnnnnnnnnnnnnnnnnnnnnnnnnnnnnnnnnnnnnnnnnnnnnnnnnnnnnnnnnnnnnnnnnnnnnnnnnnnnnnnnnnnnnnnnnnnnnnnnnnnnnnnnnnnnnnnnnnnnnnnnnnnnnnnnnnnnnnnnnnnnnnnnnnnnnnnnnnnnnnnnnnnnnnnnnnnnnnnnnnnnnnnnnnnnnnnnnnnnnnnnnnnnnnnnnnnnnnnnnnnnnnnnnnnnnggaggggcggccatccacttttcctctatcagtttgttttctagtttcttataagatgcagtgaggttatgaatcttaatgtcccagataataaatactcgactcgaccccaactgtcggatttggaggatcatgaagtgtctgaccatgtatgtttaccatgtatgttcctggcactctcatataataaacactgggaaagatgaacagtgtacgttgctcgaggttgctagttgccagcaggacctctgagttgagcactggtgctgagggaagaatgctaacatcatcttagggtgttccttcatcttagttttggtatggtggtgaagctgatccctgggagcaggaactgggtagatctcaccctgactgacagttggattgtcatagaacttcagtgatctgctctgacttgggttttacgtgccataattttaaacgtgtacactgtaaggtgtacatcgaggatttcccttgactggttgtttcaaaaacagattgttcactgggcttatagcatagtgtactggctagttttgtgtcaacttgacacagctggagaaatcacagagaaaggagcttcagttgaggaaatgcctccatgagatccaactgtaaggcattttctcaattagtgatcaagggggaaaggccccttgtgggtggtgccatctctgggctggtagtcttggattctataagagagcaggctgagcaagccagaggaggcaagccagtaaagaacatccctccatggcctctgcatcagctcctgctccctgacttgtttgagttccagtcctgacttcctttggtgatgaacagcagcatggaagtgtaagccgaataaaccctttcctccccaacttgtttcttagtcatgatgtttgtgcaggaatagaaaccctgactaagacacatagccttctcatgtcatctacaaagaccaaaaattacagacagagagtggcaggatgttggcctaccaggaggaaaagaacctgttcttccaaggggagtttcctggggacactggtaccttatagttcctaccacgctatgtcaaatcaggtgtttctgactagccagggttctatctgttgactttattgcagtcttggttctgaatacacaacatgcatgcacaggccatgcttcatgcatgtaatgccaccaaaacaaacaaacaaaacaacaacaaaacagaaaacaaaaaaataggagaaagaaactgcttgaaacactttggttcacattagagtctactgtaagatatgatttgcagtgcttgtattttataaataaagctttctgctcttatagaaacaatacttatacaaaacaaaaccttttaccattttacagtacaacattctgaagttagtatatctttggattgtaatatgctagaatctttgattttaaaaattgtgggttgggctggtgaaatggctcagcggttaagagcactgactgctcttcaagaggtcctgagttcaattcccagcaaccacatggtggctcacaaccatctgtaatgagatctgacagccctcttctggagtatctaaagacagctacagtgtactcacatataattaaaaaaaaaaaaaagaatggcctgggtccaattcccagtgccacatagaactggacatggtgttacacacctgtaatcatagctagcacctgggaggcagaggtcagatgaaca

SEQ ID NO: 296 - DNA, 5849 bp, Mus musculus
ggggccgggagcgcaaatggcgttgagatggttcagggccctgttcaaactccagcgctgaccattcaccggcggaggcggcggcgcagaaggcggcggcggcccagcgggggcacagcccctcgcctctctcggtggcaccggtcggcactggtctctcgcgcggggctcccgcgcccgcccgcgggccgttgggagcgggagaggcggaggcggcccgaggccaaagcacccgccaggcgccgaggggaatatgaaacaggtgtcaaaatgacatccagatttggaaaaacttacagtaggaaaggaggaaatggcagttcaaaatttgatgaagttttttccaacaaacggactactcttagtacaaaatggggtgagaccacatttatggctaaattagggcagaagaggcccaatttcaaaccagatattcaagaaattccgaagaaacctaaagtagaagaagaagatactggagatccctttggttttgatagtgatgatgagtctctacctgtttcttcaaaaaatttagcccagggtaagggttcatcttactcagaatctagtgaggctgctcagctggaagaagtcacttctgtatttgaagctaatagcaaatgtagtcatgtggtgggtgaagacagttttgcttccgacagatgcttacttgtggaggatactttaattgggaaagagaagagcataagtagaattccagaagacaacgcaaacaaaagtagttgcactaagttgctaacttcagataaagtggagaattttagtgaagaacatgaaaaaaatagtcaccactttcacaaaaatgctgaagatagtactaagaaacccaatgcagaaaccgcagtggcttctgaatataaagctgatgaaactaaagaaacaaatgatacttggaactcccagtctggaaaaagaacagagtctccatctgaaagttgtccagtcaaaggatctgtaagaactggtttatatgaatgggataatgattttgaagatatcaggtcagaagactgtattttaagtttggataatgagtctcttttggagatgaaagacgaggatttaaaaaatcggattggaggattggaaaatctaaatgaaacctttgaagaagatatcatacaaagtgttcttaggccaagcaactgtaggacgtactgtagggccaataaagcgagatcctcacagggagcatcaaattttgataagctaatggatggcaccagtcagtccttagccaaagcaaacagtgaatcaagtaaagatggcctgaatcaggcaaagaaaggtagtgcaagttgtgggaccagttttcgaggaacagttggacggactagagattacactgttttacatccatcttgcttgtcagtgtgtaatgttaccatccaggatactatggaacggagtatggatgagttcaccgcatccactcctgcagatttaggagaggctggccggctcagaaaaaaggcagatattgcaacctccaagaccactactagatttcgacctagtaatactaaatccaaaaaggatgttaaacttgaattttttggttttgaagatcatgatgagacaggaggtgatgaagggggttctggaagttctaattacaaaattaaatattttggctttgacgatctcagcgaaagtgaagatgatgatgatgacgactgtcaagtggaaagaaagaaagacaaaaaaagaactaaaacagctccatcaccttcccagcagcctcctcctgaaagcagcgacaattcccaggatagtcagtctagtactaataatgcagaaaacttggattttacagaggacttgcctggtgtgcctgagagtgtgaagaagcccataagtaaacaaggagataaatccaaggaaaataccagaaagatttttagtggccccaaacggtcacctacaaaagctgtatataatgccaggcattggaaccatccagactcggaagaattgcctggaccaccaatagcaaaacctcagcgtgtcacagtgaggctgtcttcaaaggaaccaaatcaaaaagatgatggagtttttaaggctcctgcaccaccactcaaagtgataaaaactgtgacaatacctactcagccctaccaagaaatagttactgcactgaaatgcagaaaagaagacaaagaattatatactgttgttcagcacgtgaaacacttcaatgatgtggtggaatttggtgaaaatcaagagttcactgatgacattgaatacttgttaagtggcttaaagagtactcagcctctaaacacacgttgccttagtgttatcagcttagctactaaatgtgccatgcccagttttcggatgcatctgagggcacatgggatggttgcaatggtctttaaaactttggatgattcccagcatcatcagaatctgtccctctgtacagctgctctcatgtacatattgagtagagaccgtttgaacatggatcttgatagggccagcctagatctcatgattcggcttttggagttggaacaagatgcctcttcagctaagctactgaatgaaaaagacatgaacaagatcaaagaaaagatccgaagactctgtgaaactgtgcacaacaagcatcttgatctagaaaacataacgactggtcatttagctatggagacattgctgtccctcacttccaaacgagcaggagattggtttaaagaagagctccgacttctgggtggtctggatcatattgtagataaagtaaaagagtgtgtggatcatttaagtagagatgatgaggacgaagagaaactagtagcctcattatggggagcagagagatgtttacgagttttagagagtgtaacagtgcataatccagagaatcaaagctacttgatagcctataaagattcacaactcattatttcatcagctaaagcattacagcattgtgaagacctgattcagcagtacaaccgtgctgagaacagcatctgtgtagcagacagtaaccctctgccttaccagaatgtaactaaccatgtgggcaaagcagtggaggactgcatgagggctataattggagtattgctcaatttaactaatgataatgagtggggcagcacaaagacaggagaacaagaaggactcataggcacagcgatgaactgtgttcttcaggttccaaagtacctacctcaggagcagagatttgatattcgagtgctgggattgggtctactcataaacctggtggagtatagtgcccggaatcgacactgccttgtcaacatgcaaacatcctgttcctttgattcctccttctctagtggagaaggcgatcatagtttaaggctagccggacaagttcatgctgttcaagctttagtgcagctatttctcgaacgagagagagcagcacaattggcagaaagtaaaacagatgaattgattaaagatgctcctaccactcagcatgataagagtggagagtggcaagaaacaagtggagaaatacagtgggtatcaactgaaaagactgatgcccttcagcatgctggcaaacacatggaggattgcatcgtagcctcctacacagccctgcttcttgggtgtctctgccaggaaagtccaatcaatgtaactacagtaagggaatatcttccagaaggagatttctccataatgacagagatgcttaaaaagttcttaagcttcatgaatcttacgtgtgctgttggaacaacaggccagaagtctatctctagagtgattgaatatttggaacattgctagctgctttacctttgcttcaggtgcttggtaatgctgaagctatccttagacaaagaaaagacatgaaagaagtccttgaagatataccaagaacattcatcagtatcattcattcgtgtttggatttttatgatcacccgatttcttcatcatgcattctgcgtttgctaaatgacagttactacatcaatctgcagctatcaaaaatgagggaaaaggttcaggctgttaacaatcccatgcagtatttaaatacacttacttggcagagtctatacctgcccctgtttccttgctgtatttcaggcaaggtttaaagagggcaatttgtgctgctgttagtgcaactgctgtgtatgttgagccactgttgtcatgccagtcaggtgcaaaggcagcttagctactgaggtattgaatgttctgaggacattctagacaacagcttagatcctttttcaggctcatttgcttttgctttttgttgaatgattccaatcgtaaataaagcttttaataattttgtgaattttttggttgttgttccctgaactactgtctatatttaaaatgagatggaatccaaagacacaagggattaatagtatatttttttattcttgattaggtttgggtgttgaactatttttcacttctgagaccatgaccatattcaatgtcataccattatgtgtcatagctataggcacaagaaaacaaatagcagtttgagggaatattatgttatataagataatgtgccctgttaaaggattaagcaaaaatagacaaacccagggtagtttacacttaatgctggggaggctcttgaaacattgttacgttttgagggacgttctctagatatattttctaatgttcagttcagtaaatatggttatacattttctcctttttttattaattggcctgaggacaggctttccagagatgtttcattaatacttttaattacctttcagatagttacatcatgtttcttcattggatttgtaaaacttaaagccataaaaatattagtttggtgtgtattggggaaaatagctaaaagtctaactttgactcattttagactttgttatttccttgtataaagtaacaaaccggggctcttgtatccgtgccagctgtaatgtttttaaatgcagtggctgccttctattgtcttcctatttttgataatgcagattgttgggaaatctataaggaagtaactgactctaggcaaattgttttcttcctcctacccgcccaaccccctacccgtccgtcaccttttaggaacacagtatgccagtgtaatgtgggaaccattgagactgtatttgccctgagtaccaaactaatttagtgaatttttttttaaacatactggtaaatgatgtccacaaatttccttagatatattttaattaattgtcttaaaatacattgatatttattaatcattggatttggggacagatttttgactgtggcagatggtagggaacagaacagtaaacagttggatgagatcaatcagggcgaattacatttttctgttacactggtgatcatttgagaattgatttacctcagtgtttaacagtttttgttttgtttttaaaatactaactaattgtcaagcactgatgagatgcaggtttggtggggtgggctgtgaggaagacctcaccttaccaactgcagtgcgtctctgtgttttagcctcagagaactctcattctagggtacttgaggctgacttgcaaagtgactaaagttttaaggtaaccttttttccattgtaaatacttctgtaaatactaccagttggatattagaacagtaggatacttttctgaatccaatcctatttttattttatacagtatttctcagctgtgatctttggagcaaaagccaacggcaggaaaaaatagtttgtaccagtttcatgaagtatgtctttgggtttttgtaaataattttaactcaaataaaattgatactttaaatacacacgttgt

SEQ ID NO: 297 - DNA, 3789 bp, Mus musculus
atggttcagggccctgttcaaactccagcgctgaccattcaccggcggaggcggcggcgcagaaggcggcggcggcccagcgggggcacagcccctcgcctctctcggtggcaccggtcggcactggtctctcgcgcggggctcccgcgcccgcccgcgggccgttgggagcgggagaggcggaggcggcccgaggccaaagcacccgccaggcgccgaggggaatatgaaacaggtgtcaaaatgacatccagatttggaaaaacttacagtaggaaaggaggaaatggcagttcaaaatttgatgaagttttttccaacaaacggactactcttagtacaaaatggggtgagaccacatttatggctaaattagggcagaagaggcccaatttcaaaccagatattcaagaaattccgaagaaacctaaagtagaagaagaagatactggagatccctttggttttgatagtgatgatgagtctctacctgtttcttcaaaaaatttagcccagggtaagggttcatcttactcagaatctagtgaggctgctcagctggaagaagtcacttctgtatttgaagctaatagcaaatgtagtcatgtggtgggtgaagacagttttgcttccgacagatgcttacttgtggaggatactttaattgggaaagagaagagcataagtagaattccagaagacaacgcaaacaaaagtagttgcactaagttgctaacttcagataaagtggagaattttagtgaagaacatgaaaaaaatagtcaccactttcacaaaaatgctgaagatagtactaagaaacccaatgcagaaaccgcagtggcttctgaatataaagctgatgaaactaaagaaacaaatgatacttggaactcccagtctggaaaaagaacagagtctccatctgaaagttgtccagtcaaaggatctgtaagaactggtttatatgaatgggataatgattttgaagatatcaggtcagaagactgtattttaagtttggataatgagtctcttttggagatgaaagacgaggatttaaaaaatcggattggaggattggaaaatctaaatgaaacctttgaagaagatatcatacaaagtgttcttaggccaagcaactgtaggacgtactgtagggccaataaagcgagatcctcacagggagcatcaaattttgataagctaatggatggcaccagtcagtccttagccaaagcaaacagtgaatcaagtaaagatggcctgaatcaggcaaagaaaggtagtgcaagttgtgggaccagttttcgaggaacagttggacggactagagattacactgttttacatccatcttgcttgtcagtgtgtaatgttaccatccaggatactatggaacggagtatggatgagttcaccgcatccactcctgcagatttaggagaggctggccggctcagaaaaaaggcagatattgcaacctccaagaccactactagatttcgacctagtaatactaaatccaaaaaggatgttaaacttgaattttttggttttgaagatcatgatgagacaggaggtgatgaagggggttctggaagttctaattacaaaattaaatattttggctttgacgatctcagcgaaagtgaagatgatgatgatgacgactgtcaagtggaaagaaagaaagacaaaaaaagaactaaaacagctccatcaccttcccagcagcctcctcctgaaagcagcgacaattcccaggatagtcagtctagtactaataatgcagaaaacttggattttacagaggacttgcctggtgtgcctgagagtgtgaagaagcccataagtaaacaaggagataaatccaaggaaaataccagaaagatttttagtggccccaaacggtcacctacaaaagctgtatataatgccaggcattggaaccatccagactcggaagaattgcctggaccaccaatagcaaaacctcagcgtgtcacagtgaggctgtcttcaaaggaaccaaatcaaaaagatgatggagtttttaaggctcctgcaccaccactcaaagtgataaaaactgtgacaatacctactcagccctaccaagaaatagttactgcactgaaatgcagaaaagaagacaaagaattatatactgttgttcagcacgtgaaacacttcaatgatgtggtggaatttggtgaaaatcaagagttcactgatgacattgaatacttgttaagtggcttaaagagtactcagcctctaaacacacgttgccttagtgttatcagcttagctactaaatgtgccatgcccagttttcggatgcatctgagggcacatgggatggttgcaatggtctttaaaactttggatgattcccagcatcatcagaatctgtccctctgtacagctgctctcatgtacatattgagtagagaccgtttgaacatggatcttgatagggccagcctagatctcatgattcggcttttggagttggaacaagatgcctcttcagctaagctactgaatgaaaaagacatgaacaagatcaaagaaaagatccgaagactctgtgaaactgtgcacaacaagcatcttgatctagaaaacataacgactggtcatttagctatggagacattgctgtccctcacttccaaacgagcaggagattggtttaaagaagagctccgacttctgggtggtctggatcatattgtagataaagtaaaagagtgtgtggatcatttaagtagagatgatgaggacgaagagaaactagtagcctcattatggggagcagagagatgtttacgagttttagagagtgtaacagtgcataatccagagaatcaaagctacttgatagcctataaagattcacaactcattatttcatcagctaaagcattacagcattgtgaagacctgattcagcagtacaaccgtgctgagaacagcatctgtgtagcagacagtaaccctctgccttaccagaatgtaactaaccatgtgggcaaagcagtggaggactgcatgagggctataattggagtattgctcaatttaactaatgataatgagtggggcagcacaaagacaggagaacaagaaggactcataggcacagcgatgaactgtgttcttcaggttccaaagtacctacctcaggagcagagatttgatattcgagtgctgggattgggtctactcataaacctggtggagtatagtgcccggaatcgacactgccttgtcaacatgcaaacatcctgttcctttgattcctccttctctagtggagaaggcgatcatagtttaaggctagccggacaagttcatgctgttcaagctttagtgcagctatttctcgaacgagagagagcagcacaattggcagaaagtaaaacagatgaattgattaaagatgctcctaccactcagcatgataagagtggagagtggcaagaaacaagtggagaaatacagtgggtatcaactgaaaagactgatgcccttcagcatgctggcaaacacatggaggattgcatcgtagcctcctacacagccctgcttcttgggtgtctctgccaggaaagtccaatcaatgtaactacagtaagggaatatcttccagaaggagatttctccataatgacagagatgcttaaaaagttcttaagcttcatgaatcttacgtgtgctgttggaacaacaggccagaagtctatctctagagtgattgaatatttggaacattgctag

SEQ ID NO: 298 - DNA, 99957 bp, Homo sapiens
  misc_feature (18861)..(24451): "n" at positions 18861 through 24451 can be any base.
  misc_feature (32241)..(32940): "n" at positions 32241 through 32940 can be any base.
  misc_feature (36743)..(36979): "n" at positions 36743 through 36979 can be any base.
  misc_feature (51687)..(51706): "n" at positions 51687 through 51706 can be any base.
agaacaatgggctgttgcaggaaaacaagtaacatgtaggaaagacaaatggacccttaggacaacagttggacataggatagtttataacaatgtctgtttaggtgtggtgccaaattctctccagcgacaagagaccatcttccctgcttgcaaaactcccaaggaagggatttatgacaactggaagttatgacaattgagttctttgggggaggatctagttttaggcagacaagggagttcaggaggaaaaaaaagctattctcaaatgtttccagattaaaatatatgttttgtttgtttgagacagggtcttgctttgtcactcaggctggagtgcagtgtaagatcatggctcactgcagtctcgaactcctgggctcaagcgatccccccacctcagcttcctgagttgctgagactacaagtgcataccaccacatctcattgatttttaaatttttgtagagacagagtctcaacatattgcccaggctggtctagagctcctaggctcaagtgatcctcctgcctccgccacccaaagtgctgggattacaagcatgagccaccaggtttccaaataatttttatgttgcagtagcatattctggacgcctttgccatgaacagatacaaatatctgaacatttactttgtacaaagcatgcatgtgtactgttagcaatacgaaatattttagcacaaaaatcaaaggagcgtataacaagttgagagtataagacaaatgaaacttaaaattttttgttttttaatattcatacaacagcaaagaaaccttatatcatgaatgttttttcagctggcaaactggcaaagataaaaacagactgatatggccgggcgtggtgcctcacgcctgtaatcccagcactttgggaggccaaggcgggcggatcacgaggtcacgagatcaagaccatcctgaccaacatggtgaaaccctgtctctactaaaaatacaaaaattagctggacatggtgacgtgcacctgttgtctgagctactccggaggctgagtcaggagaatcacttgaatccgggaggcagaggctgcagtgagccaggatggcaccactgcactccagcctggcagcagagcaagactcggtctccaaaaaaaaaaaaaaaaccatcctggctaacacggtgaaaccccgtctccactaaaaatacaaaaaaaaattagccaggtgtgatggcgggcgcctgtactcgggaggctgaggcaggagaatggcatgaacccaggaggcggagcttgctgtgagcagagatagcgccactgcactcccgcctgggtgaaagagcgagactccgtctcaaaaaaaaaaaaaaaaagactgatatgattatgttgggaggagagaacatattcaaatactgttggctggaatatgaatggttacgaagattttgcagggtggcttggcactttccatccaatctgcatggcttctcttatagtaaatgcatttctaagaattcatttcataaaataaaaacagtctcaaaggatatgtacaaacaccacagcatatttgcaatgcaaaagaaaaaaatggaaataatctaattattcattaacacgaaactggtaagtaaaattaaggtataatcagaaaatggaataactgcttaactactataaagaatgagatgattaaggctgcgcacaacacctcacacctgtaatctcagcactttgggaggcctaggtgggaggatcactttagcccaggagttcgagaccagcctaggcatcatggtgagatcccacctccacacacacaaaaattttttaattagctgggcatggtagcatgcacctctggtcccagctattcaggaggctgagatgggaggattgcttgagcccaggagttggatgctgcagtgagctgtttgcaccacagcaccactgcagcctgggcaacagaacaagaccttccctcaaaaaaaaaaaaaaagaatgaggaaattgaaatttactgacataaaaagaatccccctatatattcagtgaaaataaatttaaagataaggatgtatcgtatgaccccattttaggaaatggggacagaaaaaaagaaagaaggcaacagaaaagaaaattttttctagctctatactttcaacagtggcaatcttggggcacaggtgaagcatgattacagaagactttcattacttcatttctgtattgtttgaaatttcaaccacaaatatgtgtaacttctgttaacagaaaacacacagttctatggtaatacgtagttagggaaactatactagagtttcaccatgtgtattagcatattaaaagttctgagaaggtttgtagtaaagaaatctaatataccaaaagattatcttcaaataatgatgcagcaaagagccaactatgaggcttggaccactgaggagggcttcataggagagagaggaatattcttttttttttttttttttttttgagacagagtcttactctgtcgcccaggctggagtgcaatggtgcaatctcggctcactgcaacctccacctcccaggttcaagtgattctcctgtcttagcctcctgagtacctgggattacaggcgtgccaccacacccggctaatttttgtatttttagtggagatggggtttcaccatgttggtcaggctggtctcgagttcctgacctcgtgatcctcccgcctcggcctcccaaagtgctgggattacaggcgtgagccacagcacctggccaaggatttatactagattttaaagcattctgatgggcaaagaaccagggaaaggaaagtcaaaggcagtactgtccaatatgacgtgtaattttaaactttctagttgccacatttaaaaagtaaaaagaatcctgtgaaatcagttttgtttttttaactgagacaaggtctcaccacgttacccaggctggtctcaagctgctgggctcaagcaatcctcccacagtgctgggattacaggcatgagccaccatgcccggccaaaatcagttttaatatatttctttaatccaatgtatccctaacagtatcatctcactatataaccaatattttaaaagcataatgagatattttacatcttttggtactatcttcaaaatctggtacgtaattcacacttagactagccacagttcaagtcttcaacagccacatgtggtagtggctatctattgtagtggacagtagaggtctaaggattctgaacccaaacctgaatcggatatttaggtgacttaggctgataaaatagtaggaaaggaagcaaagcagaaaaggctgacttggccagagcaggagaccagtccaagatattctggattttctattgtaagcaaataagaaaacagggaaaaatatttaacaaatagggatgatgaccaaagcagtacttcagaaagattaacagtttttgctaaaatatacacgtacaacttcaacatgcaatttttcccccacatttttattacataaaagattataaaatgaaggaagaataatctgtcacccagcgattatatttcattgatttggtatacatttaagatacttctgaacagttaccactgaaatatttttatttcatgacatttttaaatgattcttgaaaaatgcagacattaagagcctcaccaaaatttaacagcctttactttaatattttctaacaagagcttcttttagccaggaatctaaaacattcttatatacaaatttaaaacactcaagaccctatactcttgaaatacattacaaagcattttaattactagtaagaaaactacctacaaatcttaatatacataaaacagtatcaaaactatccaagtcagccagatgtggtggctcacgcctgtaatcccagcactttgggaggctgaggcgggaggatcacgaggtcaggagattgagaccatcctggctaacacggtgaaaccccgtctctactaaaaaatagaaaaaattagctaggcgtggtggcgggctcctgtggtcccagctactcaggaggctgaggcaggagaatggcgtgaacccgggaggcagagcttgcagtgagccaacatgcgccactgcactccagcctgggcgacagagcgagactccgtctcaaaaaaaaaaaaaaaaaaaaacaactatccaagtctcctacagatttctcaccttcaaaattgagagtctatcttctcaacattttgatactttacccaaaggctaaagaaaaaaaaattaatgctcaaaaaaggaggtaagaaagcaggatacgggaagggcaccgcaggcataagccatactcccttgcaaggactgccaaggctggcgtgattcttcagccaaaagtcagaagtccagtgatgtcattaggaccaaaagcattatatgaccttcaatttcggcagctaactgtgctgcaagtcaagatattttctttctttttctttttttaagcagaaaaattatcttaaagttcaccatgttccttctattttttaagataaagaaacgaagattcggattgggttagtgtggcatccgtgattgaataggtactcagtagtaaaaccagtatcagacattatttataaaaaattagaagctgaaacttaatcattccgctgcttctttatggctttttatacttcccaaattacccacaatagatgtattgcctttaaaatttttaaaaagctgcaaaaactgctcactttactgaatacttctggccgggcgcagtggctcatgcctgtaatcccagcactttgggaggccgaggtgggcggatcacgaggtcaggagttcgagatcagcctgaccaacacagcgaaaccccgtctctactaaaaatacaaaaattagccaggcgtggtggctcacgcttgtgaccccaactacttgggaggctgaggcatgagaatcgcttaacccgggaggtagaggttgcagtgagccaagatcacgccactgcactccagcctgggcgacagagtgagactccgtctcaaataaataaataaatactactgaatacttccaaaaacagtctccttgtcctttcttgcctaaggtctcactctgcgggctacctttctcaggaaagccttccaaagtacccgcatcctgaacagcccagcttcccttatcagtcttgtaacattccctggacttcctttttgtagatcttaacataactacaactagataattatttaatgtctatcttctctacccaggccttaagttgaaatttctcaagactggccaggcgcagtggctcacacctgtaatcccagaactttgggaggccaaggcggaaggatcgcctgaggtcaggagttgagaccagcctggcccacgaggcaaaaccctgtctctactaaaaatacaaaaaggagccaggcgtattggcgggcgcctgttaaacccagctactcgggaagctgagccaggataatcacttgaacccaggaggcggaggttgcagtgagcccagatcgcaccactgcactccagcctgggaaacatagcaagactccgtctcaaaaagaaagaaaaaaaattctcaatgctgttttaggctctttgctagaccatacaaggagttctcgatacgaggtctataacctataacctgtaattctataacctataacctatgtcttcctctgccagatatatgcacctgcctgaaatgagaccacaaaagtgaagaacagaaaagacaacctcaattaattatatcatttgagcacttaggtccagccatgtctatttctagacctttcaatatcatgggggttagtggggagaagcttttccctcctttaagctaacttgagttagggctgtcacttgtaagcaagagtcacttgagagagccacccaattcccactgttggaatataaaatctatacagcaatgactcccaaatgcctacctccagcacaaacctctgtcaaaccccagacccatatagacaactgccaagtggaaatccctacttggctgtttcagatatctcaaactccatgtgatccaatactattttcttctacaaaccagctctcccacctcatttttcatatctgtcacccacatctaccctgctttccaagctagaaatccaggagttgttcttgccaatcccattccttctctcatccacgctagttatcgcctcctatccattccaggccctaattatctgccaccatcttaacccatttatgcctgaggctgcaattttttgaatttttgcaatcagaccttggtgatgaccttgagcaggatataaataactcccacgtgcttagcgttccaatagtggaacactaggcataaatgggtttaatccgggctaggccagaaagaccttcctacaagtttgaacatcttcagtcttcctttcttcaaaatgattttccaacatgtaactaatctccctaactgcaaatgtgattataatattttatccctatctctagcatactcctgtcctccttcataagtcaacagccaattatatacagctggatcaagagccaagctccactgttccagactttaacagtataacaaatctgtgccataagaaaggaaggctcatcagaaatataaaactataaaagagtaacaaagtctacaacatcagagtaaataaaagatactcaaagataatttactcatctattcaatgtctactcattagttatatattaaactgcccatacgaactggcttagggaccacaggggccaccctgagatggagtctactgatcatctgatctccctatgcccctaactagtgttcttttcaaaaaacactactggggatttccaggcacatccaagagctttgattagggagagaaacactattcatcaattctaagatgcatccatttttcatattttagcatctccggaattggggtgcaccttacaatcaatggcttcttacaactagaagcatattttaagtggtctgtaacactactgtgtatcttacaatggacataactcaatgcaagtcaacatttaatcttgtgttaaaaagttggtccaacttggtcaatatggaccttgtgatgttaaaaagacatcctaaagcctaaaaactagtaaaaggtgggaaagtagaaaaggaaaagaaatggttcctacttcaaaatttagtgtgataggaaacccattttcctttctctccatggttcgctgctcctaagatccaatagtcagatcaggacagttcaacagctactgttaggctagacaggagcctttccccatttattccttttaatatgcaagaaaagtccgttacagacccaccctgcaaactagtagtgaaactaatatttgtataaaaactgctataaaggccagccacagtgcctcacctgtgtaaccccagcacagggaggctgaggcgagcggatcaactgaggtcaggagtttaagaccagcctggccaacatggcaaaaccccacctctactaaaaatacaaaaattagccaggcgtggtcccagctacctgggaggctgaggcaggagaatcccttgaacccaggaggcagaggttgcaatgagctgagctcacgccattgcactccagcccaggcgacagtgcgagactctgtatcaaaaaaaaaaaaaaaaaaaaaagaaagaaagaaagaaagaaagaaaaaacaataaggtattaaaaaaaaaaaaaaaaaaaaacaggtaaatctgaggcaaataccacagaaaatatttcatttaatggaagacctaggaaacttctgagtggcgaagtggtaagaactgggcttacagattaatttaggcagaaatacataagattagataaaggagaaaagtgaaggcaagaaaatcataacattagtccaggtgggatgagaacttgatttagagttagggggtgggggtggagtcgcggggtggtggggggagaactacgtgaaagccaaataacactagatttgaaaataaattcctgaaaaaaatgtgaaacattaaaattcatatgagaatcagaaaatcgacacaaaccaacagctattaaagaaattgaagtgttactcaaagtcctctccagaaaaaagatctaggcctaaatggtcacataggggaggtcttccaaactttcaaggaacagataatcccagtctaaaatgatcctgaaaaagagaaaaagaaggaaagctgcccaactcgttttatgatttgactactaccttcacaccaatatgaattcagaattgccccacagttagcaagaatagagagcagaagagttacaatatcataaagcagaatcaacagatgttggctacagacaagatatgatgaaatgggaaaaggtttgggtttggtatgacatcaacaaaaataaagaacaccaaagaggcaagtttgctaaggaaaagcagctcagaacaatcaggtacagatatgtagaaagcaactgaataaaaaagaaaaaacaaaacaaacaaacaaaaaaacgtgattcagaagacacataaacaaagaattgagaattattccaacagaaaggtctgaacaatcattctaagggactagagacatagagaaaagtgatctgaaaagtgaaacttggagaacgcatattaaagaggaaagaagaaacagaaggcagaaaagtggcggagaggaacaaagtcagtataatgtcacaaaaggcccctcttcatctagttaatagttaactcttgctcatccttcacaatctgcctgggttccaacaaagcaattttaaggtatctttcccagattctcccaccaccacaagcaccagatcaggtctccatttgaagttcttataatattctgcaccttaattaaaatcacaattatatttaactagagactttatttttcaataagtatttccccactagactttaagctccatgagggaaggatctgttgtatcttactgccttggaccctgtgttagaatacagcgagtatagatgaatgaaacccaaggagaggcatctgaaaatgtgaagtcgatgttaaatcttacagaaaactcaaggagaggacttagaaaaaggtagttaaatgtgttgattaggttatagttccttgtgaaggtgaaatccagataacaaggggttaagaaatgagtggctagccaccaaccaggcaaaggcaggaaaagcagactacacttggcaatctctagagatggattgtgaatgactaaattttaatttcaatgttgcgctagttcgcaattaacaaccatgtgttacttttattacgaacaagctttttaaaatgttaataagatttgaaaaggaaaagcagcaacaagacagcttgaaggagtagcagacttaagaaaaggtttttgtaaactgaaaaaatcttaagaacatttgtactttaaagaacccaaatacgacagagaaaataactcacgctccactaagcaggaaaattagaaggaaaggaaaaaaaccccaaggtgttaactaataagaaagacaaaaaaaaaaaaaaaattctccctctttgacggaaggttaagaagccagtaacagaaggaatttaatgaaggagctcctgctaagtgcctcaacctcttctgtaaagggtggggagaagtgaagaaagtagaaaaagtttaaagtgggctccacggaaaatggaggaaaaattaaacaagaactgagtctggttctactaaaaacgcattctacatttcaatcggcctttcatacactcaccccattcctagatcagagaattgcccatattttagcttcaaatttaaaaatctaaataattctggttcacattctttatttcaacaactgaaaacaatgagacgcattaagttacactctaattcaaagtttaactcctctcacaagtaaatacaataaagtagttgttttcaactccagcaacaaaatagcgataatttcaagtaagagtaactgaaaaatgttcctaaacgtaaaagtgtttgcaaacagttttggttttttttcttcctaattcgtttgccagaatacgatgttcctgggttcaaatcccagctcccttagacaagttagttaacctctttgcgactcggtttcttcccctaaaacaatgaggaatacaataaaccagaatcgttgtaaggattaaatgacgtaacacaggtgccaagttcatactatgtactctgaacagtttgttaaccgcttaaaagagaaaacctgcaggagtttgaccaaattaaaacatctgagagcatgaaagagtaccacgctcaaacgccagaccctaacacacagcatattatttttcttccctgacgcaagctcatttttttttccttgccaaatctttccactaggagtctggaaagagaaaaaagggtccaggcaatccagcagaaagttttccaaaactgaagtacggaatcaccaggccacggagcggaggccgcgcaggacaacaggtgaagcagctccgggagctcgggggccagggccccttcccgcggggactcgggggcgggccggctgctcctctcactcgacccccgcccgaaactcattttgttctcccctgttcctccccacagcgtccggagccaaatcacaaatatcagcctcgccgctccggggcggggaggtgagcgcctttcccatttaaggattccagaagcgtccccggagcgactttcgcccactccgcatccccaaactcggcctgcaacccgcgagtgggagacaaaagaggggccggcgggggacgcggcgcggggtgccgtgggtctctggctgggcggtcccggcccagcgcgcgccgaggcctgcggagctgccggggccgggccgggcagcccctggctccggccaccgcgcgcccagctgcctctgcagcctcgcccgagcccctctggcctccccgctgcggccagcccctccggtccgcacgcgcactcccaactcacccggaccccagggaacgcatcctccagccctcggcgcggagcgggtgggcgcggcgagccgccggggcgaagtggggccccgaatcggccttcgcccttggcgtgcagcggccccgacccggtcgcccctcgatcgggccgtgcgatcttcgccgcgcgcggacggacgcgccgagcctaagccttcctgcccgcccttggccctcctccctcctcgctcctgcctcctcccttctccttcgccaagcccggcaggcggattccaatctctgcagcggccgccgccaccgccgccgactcttgccaggaggggagggggcggcgcgggtgcgggggcctgggggaggggcgggcgtccgcgggccttgcacggcgcgcgcgcactgggaaggcccccgcccgcgccgcgcgcacccgaccacgggcgcctgccccgccccgccccggacacgaaaagagccgagcgcacggcggaagcgcccgaagagttcgcggagcccggcgcccagttgccggggaggagggccagccgccggcaagggggcgccgagctgctggtgcgggcgggagtcggggctgctcctccgcgcgggcccgccggcccctccccacaagccagccccacagctgccgcccgggtagcttcccgcagacgccgtaggtagcacgcgatggaacgcggcggaggggagcgtggacacggctgccgggcgctgcggccatcggcgccctggacgcccgctccggccttcggggccggatatccccactctcgcgggctctttcgcgtggacccctcctccggccgacactcacactgcggtgaacgccagtcagctggcgtgaaataaggtcgctgggaaggcaccaagtcaccaaggtgggggatggccaggtcgtggtagttgcgacaaagaaaaatataagtcacattgcatttgtttctcgcccacccaccgctcccggcgtctcttcccgggctccttgccagcgtgccgaggcgcaggcagggtgatggaggctccccggccgggaggatctgccggggagagcggcttccctcatcgattcgggagcgccaggcccggcgcgcccgggctcctgtgacctgcgagcccgcgaattccagcggcataagataaggagcggcgagggcccaacaggactgaggtcagccagctataaatacgcctccagctccaccgcgggctcacgctggtgacctcgtgtaccctccggaggctcattccgtccatttggaaaatgcaaataattgtcaccacctcttttcttccatttcccctcattcatggtggaaaatgcttttaaaagtattcgatgacccgtatgtgaggaaagaggagataggcccctttttcaccaaatgtgactttaacctccttagtaatccaagaaatgtatcaagtttaagtcacttaacaaaagatgttcttttaaaggtgcattttaaaaaatcacttttaaaactgggtaaactgggtaaaaagaaagggggaaggaaaacaatgtgccaggcatttgtattgacacacattcttgcctgaagaggtgtttagattccagggtattcccttatattctggtgtaaatgtttgaattcccgtgtattttgtttcaattttttggtttatcttttattctgtctcccttttcttcttttacccgcctttgcccttaatgctgcagatagcctctgtcattctgaattatttttcaattctgttttcttccctaatctttttttctgggctcttcagctgtctcaggtttgacagtcatgggttgtagtatcttgctatgcaggaagaagaggatacgtgagattacttgcatcaactaaaattggtcacttttctttctcaagtttccttcataatacccagttttagtttttttgttttttggggtttttttgttcttttttttttgagacggagtctcgctctgtcgcccaggctgaagtgcagtggcgccatctcggctcactgcaagctccgcctcctgggttcacgccattctcctgcctcagcctcctgagcagctgggactacaggcgcccgccaccacgcccggctaactttttgtatttttagtacagacggggtgtcaccgtgttaataggtgttctcgatctcctgacctcgtgatcctcccgcctcggcctcccaaagtgctgggattacaagcgtgagccactgcgcccagccccagctttagttctaaaggaaaagatgggccttttgcttaaggagattcacattgattggtcaaagctctcattgacgtatgctgagcaatgtgtcggcagagaaaaccatggcaagcgtgttattatgctctttatagtctagttggatttttagacatatgaattggtctataaaatagacaacaatctcaggtgggaaccttagtacatcaagtttctgaaatgtacaaatgagtattccctggcttgtgttatctgccactgtagaaatgagagcaaaattgaagcatcaaattttaagtcgtgatatgtttgcttctctgcaaaagactctccttttcaaatcttcaggaatttttcgctctcctttgataaggcccagctagtacccaggcttcaatcctcagcgccctggctaccagcagctagtggggcatgctgttctccctggctactggcatgtttatgcatgccagcccgtttctccggtctgtctgcccagggagacatctggacacgtgtgttctggcccccaaactcaaaagcaacatctcgggatccacagttaacattccgtaatgtgttggtattcctttaagtgggttactagaataggctggaaatggtcttttcttctgtccaggtaggtcacaagagaggtagttgttacatgcccaaagcagcattcattaattacatcgtgcatttagttatttgtttgtggtctgagcccctctgctccactagaatataaactccatgagcaaaagactttgtcagtctctctttttttagagacaggttctcactttgtcacccaggctggagtgcagcggcatagtcatagttcactgtaacctggaactcctgggctcacgtgatcctcccccctcagccgcccaagtagctgggactacaggccagcttgactttgtcaatctattctcaactctctcctcagagcctagtgcctggcaagtgaatatttgttaaatgagagaagagaaataagcatacatatcctctaggcatttctaaaccttgtcaccaagacccttttagtgttagagggtggcatggctatcttggaaagagtgaaggttggctgggaaagctgtggatcacatcctcttcagtgaaatgggacttctgccttcagggatccaaggtgaatagattaatccaagctaatccattcaaagtcattttcatgttgtaaagatcttataaggcaaaaggcagcacgaagtctctgggtctgatgataagttagaggccagtaaggaggcacgagtgaaggaatgtcattggtagggtgaccctttaggttggcttcaaacccaatattaaatgggtaggtgttagggagaataaacagcttcatttttcagcatggacactactacatcttttttttttttttttttttttggttagtagtaccccatcatggcttagaaggactaaactgaaacagaaactgtggttaagaataagatggatgtatataattcagtgcacaaaatagaggaagtttaaaaacctgaattcattttcattgtggtggtacagtgttttacttcttttgtttacttctaaacaacttgctccttctcccttagctccattttaatttatctttgcctcaaagcactggctactatgattgaaagatagatgatggaggatattgctgctctcacttggtcctacctagtccgtggcctctgtattcctcctttccctactatccgtacaccctttaccatagaacctgatctttcctaggccttgaggcaggaagaattatcagagctttggtcccaagctcaagactcagcctcccactgcctcgcccctttctaagaactgacagcccttctcttgtgtctgaaaccctgacctgttagcttgccaggacctggaatttctctgcttgttgtttggacttagctgcatccctgcacccagactgctgggcagttgtaggtattgttggtggcatcacttaattgcctccagctctttgtttctaggctccctgtatctgtattctatctatctgttgggcctcccttcccccattacctcaggctggatgtccccatccccactgcgctcctggactaccacctgttgtttgctcactactctctggctatcaggcactgcctagaggactatggttcctcccaccgagcaccgggagctggggcctccctaccccaactcccacgcagcccacagtagatcttggccttccctgtcctgctgcagctcactgccctgcttttccctatcctcacagcacctggtttattgcacttggattattttttaaccagatgaaaactatatataatatatatgctctggacatacactaagtacatattaaaggtgtattatatgtaattttggctgggcgtggtggcttatgctagtaatcccaagcactttgggaggccaaggtgggtggatcatttgaggtcaggagttcaagaccagcctggccaacatggtgaaaccctgtgtctactaaaaatacaaaaattagctggatgtggcagcaggcacctgtagtcccagctacttgggaggctgaggcaggagaatcgcttgtcgcagtgagcccagatctcgccattgcactccagcccgggcaacagagcgacactctgtttcaaaaaaaaaaaagctatatatatatttttttctggctaaaaattaatccaagtgtaataggggtgtgtgtgtatataatctattgaatataattcaaatagatttctagtctgaactttgtgtgtgtgtgtaggtgtttgtgtacatatgtaagtatatgcatatatgtatatatgtacacacaaatatgcatatgtgtgcatatgcgtatgtgtgcacacatatgtgcgcatatgcgtatgtgcgcacacgtgcgtatatgcgtatgtgcacacatgtgcatatatgcgtatgtgcgcacgcatatgtgcacatgtgtatgcatgcatatgtgtgcatatgtaagtatgcatgtacacatatgtgcatatatgtaagtatacatgtacatatgtttgtatgtatacacacaaaaaacccatacatacattcaaaaatgaaaagacccatgtctgattcttcttactatccctaaacactgattctactcaagaattcctttggagctagtagtccagaaatccagcatgtggagctgaatatgattaccttgggaatgactagtaaaaggaaggcaaggtgcgatgataaaagattcaagctgagataactggggagataaaatctggatcaggagtgcagattcatgaacaccatactgtgcctactgtccatggcttacatggtaattgggatgtattcctagatgtggtgtggtgtcaccagtgtgaccaggcatactagtttacccatcggatatgttgaaagtacctgaccctgtgctggactcaaaagttcagagaatgggaactgtctcattctcactccattgtatccagtgtgctgcttggcacaccagtaggtagtcagtaagtatttattaaatgaatgacatacttaattttgttctctactggtagtttgccctggcgcatttctttttatttctattagccaaggcagggttaggtgttttgttttgttttgtttttccatatttttgaggattaatgataaagcacttatcttgttggaatgagagtctactaacaaatcctgtacatcataataacagaactatcatctaacaacttgttctcaataaataaactttaaaacaacttcctttattatttcaaaggcatacatagtcatatatataaccagtaaccaatacttgtcagtgtttattttaaaatgcagattagtttccatttagtttgctacctaccttaaagcccctcttcctccgatcctgaatgctgctagctctcctcctaattggtcattccctctttcaactaatgttgcccagttgtttagatttctattgtgaaacaccagtcccattaaatctgaaaacactgctatagagtaacatttcgttagactggtctcactactttctgaagaatggaccatattcattctccatttaatgccattctcctccctatactgcctgagtaccacctcttccaagaagtcatctttgactactccatcctcatctccttaggcttttctctcaatggtctacatcactgactttccacatagcttagctgttcttatgtctttctcacaaataagttttcataccttcgttcttcaacataaataggggcctctcagcctgagggagacagtttagggagtaccaaaatacacgtagtatcaaaaaagcagtcccaggccactggagcttaccagttattgaatccttgcttctgcgaatccattgttttgaaggttggtgggtagttgcaaactccttgatgcatctgctgtgctgttgcatcctccctcctgtctatctcccctgcgtatgtaccactgtcgctatggtcacggtactgagcaccagggttgctaggttgcacaactttaagggggtgccattcgcaacctgcctgacacgaatggtgctccctggaattatgcattgcaacatctgcacgtgatcctgtcgaacaccagaaaattctactccagtggcaatggggaggctggtccctggcttgcttaaagaacccgcttttttattgtgtaacattatatacctttcaggacatttgacaagatatatttaagcatttgttaattttgtattattaaatatgtgtgtttataaagaaatagattatcctgaaataaagagaaaacgttggcagtgttctgtggtggcctaatggatggttattattttcttccataagctttatctcccccacaatggacaatgttatacgttactttttttttttttttttttttttttgagagtctgctctgtcgcccaggctggagtgcaattatatgatcttggctcactgcaacctctgcctcccgagttcaagtgattctcctgcctcagcctcctgagtagctgggactacaggtgtgcgccaccacacccagctaatttttgtatttttagtagagacggggtttcaccatgttggccaggctgatcttgaactcctgacctcatgatccgcccgccttggcctctcaaagtgctgagattacaggcgtgagccactgtacccggcccaatgttacttttataatcagaaaagtagatattttcgactgtgggtttcagcaccaaaaaaaaaaaagagtagatattatttaaaagaactggttgattgatagagagaaaaatgaaagtggcaaattgtatatttgtcagaatgaagtcagttagaatcccatataagatatgtaattaaagtttttatttatttgattgacgtgaatatttttcttggtaaaaagagttattctaggccaggcacagtggctcacccctgtaatcctagcactttgggaggccaaggcaggcagatcgcttgagtccaggagttccagaccagccggggnnnnnnnnnnnnnnnnnnnnnnnnnnnnnnnnnnnnnnnnnnnnnnnnnnnnnnnnnnnnnnnnnnnnnnnnnnnnnnnnnnnnnnnnnnnnnnnnnnnnnnnnnnnnnnnnnnnnnnnnnnnnnnnnnnnnnnnnnnnnnnnnnnnnnnnnnnnnnnnnnnnnnnnnnnnnnnnnnnnnnnnnnnnnnnnnnnnnnnnnnnnnnnnnnnnnnnnnnnnnnnnnnnnnnnnnnnnnnnnnnnnnnnnnnnnnnnnnnnnnnnnnnnnnnnnnnnnnnnnnnnnnnnnnnnnnnnnnnnnnnnnnnnnnnnnnnnnnnnnnnnnnnnnnnnnnnnnnnnnnnnnnnnnnnnnnnnnnnnnnnnnnnnnnnnnnnnnnnnnnnnnnnnnnnnnnnnnnnnnnnnnnnnnnnnnnnnnnnnnnnnnnnnnnnnnnnnnnnnnnnnnnnnnnnnnnnnnnnnnnnnnnnnnnnnnnnnnnnnnnnnnnnnnnnnnnnnnnnnnnnnnnnnnnnnnnnnnnnnnnnnnnnnnnnnnnnnnnnnnnnnnnnnnnnnnnnnnnnnnnnnnnnnnnnnnnnnnnnnnnnnnnnnnnnnnnnnnnnnnnnnnnnnnnnnnnnnnnnnnnnnnnnnnnnnnnnnnnnnnnnnnnnnnnnnnnnnnnnnnnnnnnnnnnnnnnnnnnnnnnnnnnnnnnnnnnnnnnnnnnnnnnnnnnnnnnnnnnnnnnnnnnnnnnnnnnnnnnnnnnnnnnnnnnnnnnnnnnnnnnnnnnnnnnnnnnnnnnnnnnnnnnnnnnnnnnnnnnnnnnnnnnnnnnnnnnnnnnnnnnnnnnnnnnnnnnnnnnnnnnnnnnnnnnnnnnnnnnnnnnnnnnnnnnnnnnnnnnnnnnnnnnnnnnnnnnnnnnnnnnnnnnnnnnnnnnnnnnnnnnnnnnnnnnnnnnnnnnnnnnnnnnnnnnnnnnnnnnnnnnnnnnnnnnnnnnnnnnnnnnnnnnnnnnnnnnnnnnnnnnnnnnnnnnnnnnnnnnnnnnnnnnnnnnnnnnnnnnnnnnnnnnnnnnnnnnnnnnnnnnnnnnnnnnnnnnnnnnnnnnnnnnnnnnnnnnnnnnnnnnnnnnnnnnnnnnnnnnnnnnnnnnnnnnnnnnnnnnnnnnnnnnnnnnnnnnnnnnnnnnnnnnnnnnnnnnnnnnnnnnnnnnnnnnnnnnnnnnnnnnnnnnnnnnnnnnnnnnnnnnnnnnnnnnnnnnnnnnnnnnnnnnnnnnnnnnnnnnnnnnnnnnnnnnnnnnnnnnnnnnnnnnnnnnnnnnnnnnnnnnnnnnnnnnnnnnnnnnnnnnnnnnnnnnnnnnnnnnnnnnnnnnnnnnnnnnnnnnnnnnnnnnnnnnnnnnnnnnnnnnnnnnnnnnnnnnnnnnnnnnnnnnnnnnnnnnnnnnnnnnnnnnnnnnnnnnnnnnnnnnnnnnnnnnnnnnnnnnnnnnnnnnnnnnnnnnnnnnnnnnnnnnnnnnnnnnnnnnnnnnnnnnnnnnnnnnnnnnnnnnnnnnnnnnnnnnnnnnnnnnnnnnnnnnnnnnnnnnnnnnnnnnnnnnnnnnnnnnnnnnnnnnnnnnnnnnnnnnnnnnnnnnnnnnnnnnnnnnnnnnnnnnnnnnnnnnnnnnnnnnnnnnnnnnnnnnnnnnnnnnnnnnnnnnnnnnnnnnnnnnnnnnnnnnnnnnnnnnnnnnnnnnnnnnnnnnnnnnnnnnnnnnnnnnnnnnnnnnnnnnnnnnnnnnnnnnnnnnnnnnnnnnnnnnnnnnnnnnnnnnnnnnnnnnnnnnnnnnnnnnnnnnnnnnnnnnnnnnnnnnnnnnnnnnnnnnnnnnnnnnnnnnnnnnnnnnnnnnnnnnnnnnnnnnnnnnnnnnnnnnnnnnnnnnnnnnnnnnnnnnnnnnnnnnnnnnnnnnnnnnnnnnnnnnnnnnnnnnnnnnnnnnnnnnnnnnnnnnnnnnnnnnnnnnnnnnnnnnnnnnnnnnnnnnnnnnnnnnnnnnnnnnnnnnnnnnnnnnnnnnnnnnnnnnnnnnnnnnnnnnnnnnnnnnnnnnnnnnnnnnnnnnnnnnnnnnnnnnnnnnnnnnnnnnnnnnnnnnnnnnnnnnnnnnnnnnnnnnnnnnnnnnnnnnnnnnnnnnnnnnnnnnnnnnnnnnnnnnnnnnnnnnnnnnnnnnnnnnnnnnnnnnnnnnnnnnnnnnnnnnnnnnnnnnnnnnnnnnnnnnnnnnnnnnnnnnnnnnnnnnnnnnnnnnnnnnnnnnnnnnnnnnnnnnnnnnnnnnnnnnnnnnnnnnnnnnnnnnnnnnnnnnnnnnnnnnnnnnnnnnnnnnnnnnnnnnnnnnnnnnnnnnnnnnnnnnnnnnnnnnnnnnnnnnnnnnnnnnnnnnnnnnnnnnnnnnnnnnnnnnnnnnnnnnnnnnnnnnnnnnnnnnnnnnnnnnnnnnnnnnnnnnnnnnnnnnnnnnnnnnnnnnnnnnnnnnnnnnnnnnnnnnnnnnnnnnnnnnnnnnnnnnnnnnnnnnnnnnnnnnnnnnnnnnnnnnnnnnnnnnnnnnnnnnnnnnnnnnnnnnnnnnnnnnnnnnnnnnnnnnnnnnnnnnnnnnnnnnnnnnnnnnnnnnnnnnnnnnnnnnnnnnnnnnnnnnnnnnnnnnnnnnnnnnnnnnnnnnnnnnnnnnnnnnnnnnnnnnnnnnnnnnnnnnnnnnnnnnnnnnnnnnnnnnnnnnnnnnnnnnnnnnnnnnnnnnnnnnnnnnnnnnnnnnnnnnnnnnnnnnnnnnnnnnnnnnnnnnnnnnnnnnnnnnnnnnnnnnnnnnnnnnnnnnnnnnnnnnnnnnnnnnnnnnnnnnnnnnnnnnnnnnnnnnnnnnnnnnnnnnnnnnnnnnnnnnnnnnnnnnnnnnnnnnnnnnnnnnnnnnnnnnnnnnnnnnnnnnnnnnnnnnnnnnnnnnnnnnnnnnnnnnnnnnnnnnnnnnnnnnnnnnnnnnnnnnnnnnnnnnnnnnnnnnnnnnnnnnnnnnnnnnnnnnnnnnnnnnnnnnnnnnnnnnnnnnnnnnnnnnnnnnnnnnnnnnnnnnnnnnnnnnnnnnnnnnnnnnnnnnnnnnnnnnnnnnnnnnnnnnnnnnnnnnnnnnnnnnnnnnnnnnnnnnnnnnnnnnnnnnnnnnnnnnnnnnnnnnnnnnnnnnnnnnnnnnnnnnnnnnnnnnnnnnnnnnnnnnnnnnnnnnnnnnnnnnnnnnnnnnnnnnnnnnnnnnnnnnnnnnnnnnnnnnnnnnnnnnnnnnnnnnnnnnnnnnnnnnnnnnnnnnnnnnnnnnnnnnnnnnnnnnnnnnnnnnnnnnnnnnnnnnnnnnnnnnnnnnnnnnnnnnnnnnnnnnnnnnnnnnnnnnnnnnnnnnnnnnnnnnnnnnnnnnnnnnnnnnnnnnnnnnnnnnnnnnnnnnnnnnnnnnnnnnnnnnnnnnnnnnnnnnnnnnnnnnnnnnnnnnnnnnnnnnnnnnnnnnnnnnnnnnnnnnnnnnnnnnnnnnnnnnnnnnnnnnnnnnnnnnnnnnnnnnnnnnnnnnnnnnnnnnnnnnnnnnnnnnnnnnnnnnnnnnnnnnnnnnnnnnnnnnnnnnnnnnnnnnnnnnnnnnnnnnnnnnnnnnnnnnnnnnnnnnnnnnnnnnnnnnnnnnnnnnnnnnnnnnnnnnnnnnnnnnnnnnnnnnnnnnnnnnnnnnnnnnnnnnnnnnnnnnnnnnnnnnnnnnnnnnnnnnnnnnnnnnnnnnnnnnnnnnnnnnnnnnnnnnnnnnnnnnnnnnnnnnnnnnnnnnnnnnnnnnnnnnnnnnnnnnnnnnnnnnnnnnnnnnnnnnnnnnnnnnnnnnnnnnnnnnnnnnnnnnnnnnnnnnnnnnnnnnnnnnnnnnnnnnnnnnnnnnnnnnnnnnnnnnnnnnnnnnnnnnnnnnnnnnnnnnnnnnnnnnnnnnnnnnnnnnnnnnnnnnnnnnnnnnnnnnnnnnnnnnnnnnnnnnnnnnnnnnnnnnnnnnnnnnnnnnnnnnnnnnnnnnnnnnnnnnnnnnnnnnnnnnnnnnnnnnnnnnnnnnnnnnnnnnnnnnnnnnnnnnnnnnnnnnnnnnnnnnnnnnnnnnnnnnnnnnnnnnnnnnnnnnnnnnnnnnnnnnnnnnnnnnnnnnnnnnnnnnnnnnnnnnnnnnnnnnnnnnnnnnnnnnnnnnnnnnnnnnnnnnnnnnnnnnnnnnnnnnnnnnnnnnnnnnnnnnnnnnnnnnnnnnnnnnnnnnnnnnnnnnnnnnnnnnnnnnnnnnnnnnnnnnnnnnnnnnnnnnnnnnnnnnnnnnnnnnnnnnnnnnnnnnnnnnnnnnnnnnnnnnnnnnnnnnnnnnnnnnnnnnnnnnnnnnnnnnnnnnnnnnnnnnnnnnnnnnnnnnnnnnnnnnnnnnnnnnnnnnnnnnnnnnnnnnnnnnnnnnnnnnnnnnnnnnnnnnnnnnnnnnnnnnnnnnnnnnnnnnnnnnnnnnnnnnnnnnnnnnnnnnnnnnnnnnnnnnnnnnnnnnnnnnnnnnnnnnnnnnnnnnnnnnnnnnnnnnnnnnnnnnnnnnnnnnnnnnnnnnnnnnnnnnnnnnnnnnnnnnnnnnnnnnnnnnnnnnnnnnnnnnnnnnnnnnnnnnnnnnnnnnnnnnnnnnnnnnnnnnnnnnnnnnnnnnnnnnnnnnnnnnnnnnnnnnnnnnnnnnnnnnnnnnnnnnnnnnnnnnnnnnnnnnnnnnnnnnnnnnnnnnnnnnnnnnnnnnnnnnnnnnnnnnnnnnnnnnnnnnnnnnnnnnnnnnnnnnnnnnnnnnnnnnnnnnnnnnnnnnnnnnnnnnnnnnnnnnnnnnnnnnnnnnnnnnnnnnnnnnnnnnnnnnnnnnnnnnnnnnnnnnnnnnnnnnnnnnnnnnnnnnnnnnnnnnnnnnnnnnnnnnnnnnnnnnnnnnnnnnnnnnnnnnnnnnnnnnnnnnnnnnnnnnnnnnnnnnnnnnnnnnnnnnnnnnnnnnnnnnnnnnnnnnnnnnnnnnnnnnnnnnnnnnnnnnnnnnnnnnnnnnnnnnnnnnnnnnnnnnnnnnnnnnnnnnnnnnnnnnnnnnnnnnnnnnnnnnnnnnnnnnnnnnnnnnnnnnnnnnnnnnnnnnnnnnnnnnnnnnnnnnnnnnnnnnnnnnnnnnnnnnnnnnnnnnnnnnnnnnnnnnnnnnnnnnnnnnnnnnnnnnnnnnnnnnnnnnnnnnnnnnnnnnnnnnnnnnnnnnnnnnnnnnnnnnnnnnnnnnnnnnnnnnnnnnnnnnnnnnnnnnnnnnnnnnnnnnnnnnnnnnnnnnnnnnnnnnnnnnnnnnnnnnnnnnnnnnnnnnnnnnnnnnnnnnnnnnnnnnnnnnnnnnnnnnnnnnnnnnnnnnnnnnnnnnnnnnnnnnnnnnnnnnnnnnnnnnnnnnnnnnnnnnnnnnnnnnnnnnnnnnnnnnnnnnnnnnnnnnnnnnnnnnnnnnnnnnnnnnnnnnnnnnnnnnnnnnnnnnnnnnnnnnnnnnnnnnnnnnnnnnnnnnnnnnnnnnnnnnnnnnnnnnnnnnnnnnnnnnnnnnnnnnnnnnnnnnnnnnnnnnnnnnnnnnnnnnnnnnnnnnnnnccaggcgtggtggcgggtgcctgtagtcccagctacttgggaggctgaggcaggagaatcgcttgaacccgggaggtggaggttgcagtgagctgagagcacgccactgcactccagcctgggcgacagatccagacaccgtctcaaaaaagaaaaaaaaaaagaaaaaggttatagagcatctcgtccagggcatctttttttttttttaataataataacttaaaacagagcatgatttttaaagctaaaatattagattgtaagagaaattttacaattgcagaaagttcctagaggacatgtgtttactgtcctttgcttgtaggtctgctttatataaagttgaagaaacgtttattgccttatgatagtgaaattatgcataacttaattatctcctcaaccagactatgagctctgtgaggcaaggattgtgcctcatttgcctctgaattcacaataaagtacttagttacttagcatgaggccttgctcaaagtaaaggctcaatgaatgtggaactaaactcaactctgtcttcctcccagtgcttctgatgaatatagtatttccacaaaggaaaggacttcacatcaagtgcctagtggagagaggtattttggggagatgtattttacctatctaaaccttggcttccttacctggtagagttgtgaagttcaatgagaaaagatacataaagtgccaagcactgtgcataagcatagaaggtgcatgcacacacacacgcaaacaataagaaaacttgtttcctttcctctaaagtcacattctggttattaacctacaaactatgacattatcctggtcatttaaatcattccaagcaactaaaaaaggacctggtatctatggctcaggtctgagccactgcctggggcttctgcaacaccccatctttcctcctaaactcgcaacctcatattaccataccattcaacagcttgcttactctttgggttaccttcccattaaacctgggcttatagggataattcaactagaaagtggagagaggtaaccgcttcttaggaggagggagctgcagagccatttccagccttgcctcactcagtaatctgatttcccctcccaattccagggcatgtcttggccctggttccaggaacagtcctggacaaatgttgccaattcctaacatagagcatgaaccagggaatcaggatcccaaaatggctgtgtcttttattctattggcctgagtctagagtagctttaccaagaaactaatgcagcttaaacttcaaggctcctccctcacttccaaagacccccatgggtgctaagagttgctggaatattctaggttgagagggaaagctagtttgcaatcagggaacttttttttttttttttgagatgacgtttcactcttgttgcccatgctgaactgcaatggtgcaatctcaccttactgcaacctctgcctcctgggtccaagcgattctcctgcctcagcctcccaagtagctgggattacaggcatgcaccaccacacctggctaatttttgtattcttagtagagatggggtttcaccatgttggccaggatggtctcgaactcctgacctcaggtgatccacccacctcagcctcccaaagtgctgggattacaggtgtgagccaccacgcccagcccagggaacactgttatgtaagcttttctgataacttgcctaagtaggctttagaagaaagtgacctagagttctgggactccactcatttgttgtgattttgtcctcattctaaatgaatactccatttggtgtttgcagctactgtaacccctttttttcttttctgtctttcttttttctcttttttttttgagacagagtctcactctgtcgcttaggctggagtgtagtggtgcaacctcagctcactgcaacctccgcctcccaggttcgggcaattctcctgcctcagcctcccgagtagctgcaattacaggcgcgtgccaccacgcctggctaatttttgtatttttagtagagacggggtttcaccatgttggtcaggctggtctcgaactcctgacttcatgatccacccaccttggcctcccaaagtgctgggattacaggcgtgagccgccggcgtcctgccagctttttttttttttttttttttaacaaggtctcactctgtcacccaggctagagtgcagtggtgtgatcacagctcactgcagcttccatctcctgggctcaagcgatcctcccaccctggcctgcagaatagctgggaccacagtcgcatgctgccacgcccagctaattttaaattctttttttcttttcttttcctttttttttttttttttttttgaggtggagtctcattctgtcacccaggttggactgtagtagcacgatcttggctcactgcaacctccacctcccaggttcaagcagttctcctatctcagcctcctgagtagctgagattacaggcacacaccactacacttagctaatttttgtatttttcatagagacagggtttcaccatattggtcaggctggtcttgggctcctgacctcaggtgatccacccacctcagcctcccaaatatattctttttcttaaagatggccccacaaaacactggattccaggctgagtcaggcccttctccaatctgtatctacttttctacaatgcttccctctcctgcagctcaccagaaagtcacaagtaggatgagaggggctccgcagggatgtggaggtgaccacatgcaagatagaattgccatcaccactggcattccttctaccccaggcacacattggatgccttgcagtgatccttcttccacaaatgctgggattctcctgcattcccagtgcttctatttgaaatagttttcaggataccctgaattcaggataatacccatcctgaattcagcattggacattgtattagttgagattcttttggttgcaagtgacagcaaccgaatttaaacaagcagaaggaaaaaggcgagaactagactttgaaccagagttagataaagggaataactgatttgcaaatggaaaggtattctgtaagaatttacttaataaaatatttggggttttgaatagaatttgtttgtgaaaaacagcactttgttctcagctaagcaataacaattatggcattctttggttatttcaattatgttttttttttttttttgagatggagttttgctcttgttgcccaggctggagtgcaatggtgcaatctcagctcaccacaacctccgcctcccaggttcaagtgattctcctgcctcagcctcccaagtagctgggattacaggcatgcgccaccacgcccggctaattttgtattttagtagagatggggtttcactatgttggccaggctaatctcgaactcccgacctcaggtgatccaccctcctcggcctcccaaagggctggggttacaggcatgagccaccgagcccgacccaaatggttatttctatgtaaacagacagtttttaaataatgtgaaaatacaggagtgttttggaaataccgaggtgggaacaccggcccgctgtggccaggacgatggcacatcatgagaaggtagcacttgcggttgagaagtgaggctggagagacacagcggcctggcatatgggacttgtaaatgcaggttagtttgggctctgttgagggataatgagaagacatttataagttgtgcaggtccattagatggtcagatttatttttggagagatcctgaatgggaacggattcgggggtggatacggagcaaaatggagacaaggagatcagttaggaagctgctgagatgatgcagaggagagatgttttttaaaggcaggagtcctgaggatgagaggagaaaacaaattcaagacaggttcaggaagtacatgggcagcctgtggtggttatttgttgtcagagcaatatgggagaagacactaggatgatcccagatatttagtttcaatgaccgggtggtgcctacaattcactgaaagaaagaatacaagaggagaagcaggttggctaggaggatggagaactaagtcagtggcagccctggaattcctctatggaagagattcagtcagaaggcatgtggtatttgtcttgaaattatagttacaattataagcattctgcatttatttagcatgcatgttcagaaatgatagcatggatggcggattatttgaaggccttctcaatagaagtttaatcaccttgtttaagcagacaaggatatatgaataacataaatgttttgcattcaaagggaatttaccagccaaataataaactgaagacctcgtctcgcattatattttctaaaggtttgcttagctacttggtggtcaaatatttcagtttatttctgttctactccaaatgacttcatttctagaaaagttgctatatttccttttatatcatttgttttcaaataagtttagggtaaaatcctctcatagcaattttttttttctttttaataatgaagacccttctgagggtactatgtttaacaaaatcaaactcattctttttcgaggtaatctgtttctaggaattactgaaaggtaaaaggaagttttccataacatgtatgatttttagcacctgaatcagaccttgaaagagctgtgcaattacaaatagaaaacacatcttattgttttaatacttcttgaagctatagcatggatgacagaatgtcacatcctgaatttggcattggatgttgtattagttgagattcttttggttgcaagtgacagaaacccaatttaaacgaggtcaagaataaagggaaggccaggtgcggtggctcatgcctgtaatcccagcactttgggaagctgaggtgggtggatcacttgaggtcaggagttcgagattagcctggccaacatggtgaaaccccatctctactaaaaatacaaaaataagccaggtgtggtggtgcatggctgtaatcccagctacttgggaggctgaggcaggagtattgcttgaacccaggaggtggaggttgcattgagccaagatggcgccactgtactccagcctgggtgacagagtgagactctgtctcaaaaaaaaaaaaaaaaaaaaaaaaaaaaagaataaaggggaaattgagcaaaaggaaaagataagtgtggagccttgggaatgacaagatccagaagccatcacactggcagaacactccgtctctctcatttcaactctttgctttccagtgcctgttggcttctttctctcctagagtaaacagactttcttcacacaagagggaacagagggcctgttggactcattcttccagctcagccaccagtaagagaagagaatctctctccaagatctggttttagcagtctcagggaagaagaattctgattgttctggcttggttcacaaacccacttcttgaaccaatcatgcacctaaaggggcagggtctgtatcagaagaaaggatagacgcacatacagatggccaaccatccagcccgtgaagtaggtgggcttgggtggctgtgggacatccacgtgaagcagtgaggcaaaatctggacacatgagcctgaggctcagaggacagcactgaactgaagacattctgtccgatggctcagaaagtcactgattgccttgacaaaattaatggcaggatttattccacaagctcagtagatagattaacacatgatctttattcttagataacccttcatatgtgtgttaatagaggcttaactaggatcagacagtgaagttcatagttataaaataaattgtttttacaagaaagcaggccaggcgcagtggctcatgcctataatcccagcactttggtaggccgaggcgggcagatcacttgaggtcaggagtttgagaccagcctggccaacatggcgaaacactgtcttttctaaaaatacaaaaattagctgggcatggtggtgcacacctgtaattccagatactcaggaggctgaggcactagaatcacttgaacccggaaggcggaggttgcagtgatctgagattgcaccactgcactctagcctgggtgacagagtaagactctgtttcaaaaaaaatttttttaataaaataaataaaaataaataacttttttttgaaaaaaagaatgttggccgggtgcagtggcttactcctgtaatcccagcactctgggaggccaaggcaggtagatttcttgaggtcaggagttgagaccagcgtggccaacatggcgaaacctgtctctactaaaaatacaaaaattagctggatgtggtggcaggcacctgtagttccagctactcaggaggttgaggcaggagaatcgcttgaatgtgggaggtggaggttgcagtgagccaagattgcaccactgcactccagcctggaagacagagtgagactttgtctcaaaaaaaaaagtcaaaaaaaaaaaaagtaaactccacaagagcagaagtttttgtctgctgtactcactgttgtgttgtcagtgtccagagcagtgcctgttcatgtcactagtaggtgctcaataaatatttgttgaaagaatgaatgagcaaataagcaaacaatatttattctgtccacaaatccttaggggggcagaaattatgtacaagttaattataccaaattctaatttttggttcatatttctgggctattagtattttgtgtgtgtgtgtgtgtgtgtgtgtgtgtgtgtgtgagtgtaggagccttttcttctccatcatctatttttaaaattgttatagctttaagaagtactaaaatgatgagatgtgatttctgtttgtaattgcacagctctttcgaagtctgattcaggtgctgaaaatcaaatatggtatgtacaacttccctttactcttcagtaatttctagaaacagaataccttgaaaaagaatgagtttgattttgttaaacatagtaccctcagaagggtcttcattattaaaaagaaaaaaaaattctatgagaggtctttactctgaacttatttgaaaacaaatgatgtaagaggaaatatggcaacttttctagaaatgaagccatttagagcagaatagaaataaattaattggaaatattttaccgccaagtagctaagttaacaaacctttatggaaatataatgcgagatgaggtctttggtttattatttgcctggtaattccctttgtatgcagaacattcgtgttattcacatatccttgtctgtttaaacatggtgattacactgctattgagcatcagggcaagcaagttgtgtttattcccacagaatgttttgttttgtctccaacttttatttgtggccatatagaagtaagctacttctgatgtgacatgaaaaattttacacagaaaaatctgtatttgcacatcctttggggggctttatttttgctaaaaagtagaattcacacaggcaaaaaaaaaaacacatgcaaaatatttttgtgcacacctttaacaggctacattccacttctgaaatgtttccaaaaacaaaacaaaaaatcccaaagccagaatactgagttaaaaagttaacacattataaaagctaggttcctaacacaaacactgcagatataagctgcagatataagtcactccattgcaaaaagttgtgattataatttttttttttttttttttgnnnnnnnnnnnnnnnnnnnnnnnnnnnnnnnnnnnnnnnnnnnnnnnnnnnnnnnnnnnnnnnnnnnnnnnnnnnnnnnnnnnnnnnnnnnnnnnnnnnnnnnnnnnnnnnnnnnnnnnnnnnnnnnnnnnnnnnnnnnnnnnnnnnnnnnnnnnnnnnnnnnnnnnnnnnnnnnnnnnnnnnnnnnnnnnnnnnnnnnnnnnnnnnnnnnnnnnnnnnnnnnnnnnnnnnnnnnnnnnnnnnnnnnnnnnnnnnnnnnnnnnnnnnnnnnnnnnnnnnnnnnnnnnnnnnnnnnnnnnnnnnnnnnnnnnnnnnnnnnnnnnnnnnnnnnnnnnnnnnnnnnnnnnnnnnnnnnnnnnnnnnnnnnnnnnnnnnnnnnnnnnnnnnnnnnnnnnnnnnnnnnnnnnnnnnnnnnnnnnnnnnnnnnnnnnnnnnnnnnnnnnnnnnnnnnnnnnnnnnnnnnnnnnnnnnnnnnnnnnnnnnnnnnnnnnnnnnnnnnnnnnnnnnnnnnnnnnnnnnnnnnnnnnnnnnnnnnnnnnnnnnnnnnnnnnnnnnnnnnnnnnnnnnnnnnnnnnnnnnnnnnnnnnnnnnnnnnnnnnnnnnnnnnnnnnnnnnnnnnnnnnnnnnnnnnnnnnnnnnnnnnnnnnnnnnnnnnnnnnnnnnnnnnnnnnnnnnnnnnnnnnnnnnnnnnnnnnnnnnntttgtctttttggcaaataggagtccctcagaatctacacttgctctgaaatgtagaaaaattgattcaataaaggacggtggtgaaaccgtcctttgagatattttacttttcttcttaaagagcatacactttttaatgatcgtgtgtgtgtgtgtgtgtgtgtgtgtgtgtgtgtgtgtgtgtgtgtgtaaaccctttaaaaagagattttggaaactgaattctgggaacgttttttttttttttccttcctcaagaccagcccctgataattgaatagatagtttttggagaaaatgacttagagcctgtcagtacagtcagcaacctccttgtccctgcatatttgaactttccaaaaataacagaatgctccaaggtacttgtctgcagctcctgacaaatctccaggcagtcccagcagattttactctgcctgctgctttgtattcaccttctcacagatccaaaggtaggaagggccctgtggcaggagcacatccatgtcccttcctgatgctccctgggggagactggtggcttcgtgcttggaaaaaataggggcttcctgcagctagggacatagctagctgcttccttctccctcatggagaagagacaggtaagatggcagtcccctggaagtctcagtccttagaagaaaagagttctaatacattcccataaaacatttcaaacatgcaaagagaaaaatccaaaacaggagtgaggacagaatagagtgagttggaagagagcctaaatatcgtgctcaagtgagaaacatccacgcaagtgcctgcttcaatgccatgttttcaatgagcatattaacagggcttcctaaaaagggaagcgactacactgtttccaaccacagaatctaagctgccttctttatcaccaaacagctttaagatgcttacctaactcaaactatcactagtataaagtagtttgaaggcccctctacttcaataaatacttaaataatagctagatcaactcagctcatacattttcaaaatattggccaaaacagcaaatgcatatatatcagtgcatctgtcccttccagcagttaacacaattgtacaaactcagtgtgctgcatttaaaggaacatttgaaaaggatgatgcagacctgaaggtgggaggtcctgcctcctcgtgtgttcttactgagggtggcagaaagtaagtttcctcttccccacccagagtttgggcatgtgagcctattctgccatcctgtttcagacactgtctctctgtctctcttcttttccacaggccaccaagcctatttgagatggagggtactgggggagacgtcataagtgagcagtcacaagttggggtgaaattcatgcacacgactggacactcatgctaacgaacccttaaagctaaacaaaggccaaagacaacccaaagcctttaaaaaaatctctcacacaccacagagcaaaactggaaaaacccaactctactttcccatcacaattcaaaaaggagctaagccttctggggatgttggatgtttcagactgagagagggtggctgacagggccatcttttctcagctgtctgcaacctgagccagagcccttcctggagccctggcaattgcccagtggctcccagaagacatctctttggacgtccgggctcccaagaaggttttaagtttgttcaaggtctgaagtctgatgcgcagaggtagctccatgacgctagtaatggaataacacttccttttttggtgaggaaagcccaatgggtcttagctaacaagctctcagctatgactctaaaaataccctgcagcgagtgctgtttggcacttcaatttgtttgccaggggagcgcttaagaactccgcagaatgcttcagattctccacagctgctctaagctctgtcctcctctggtgaccaaagcaagtgtatcgctttgggaaagctgcttgttgcttttcacttttgagttcttggaattctgctctaaatgtctgaagtacaattccagtcttggattaataactagcttggttttgagtcttcatttggctcctagtctgaactatgcaaatgcacgatctgtgtacagaagaaaaaacctaaaattatacttccaaagggctcagtcgcttcctctctctccccattcccctcagaagaaacatcagcctcccgaatcctttgttgccagcagcaggagcagctccgggcctcgtcagcacaggcggccttggccgcctacaagttgatggtgtgtgcgtgcttcttgcacaggggtctgtccttcttggagtagaacggctgcccctccagattcacatggcagacctggagcagagaacagacctgcgtgagacccacgtggcacagggcatgagcagatttcaatcacttttttaagaaaacgccctggccaggcgtggtggctcagtcctgtaatcccagcactttggaaggccaaggcaggcagatcacttgaggtcaggagtccaagaccagcctggccaacatggcgaaactccatctctactaaaaatacaaaaattagccaggggcatgttggcatgtgcctgtaatcccagctactcgggaggttgaggcagaagaatttcttgaacccgggagacagaggttgcagtgagctgtgattgtgccactgcactccagcctgggcaacatagcaagactgtctaaagcaaacaaacaaacaaacaaacagccttgccccatgcattccagagaaaaggcaacagcctatttctcccactatgaattcttaatgacggaagcagagtacatgagttggactatataaaaactaagattcctgaagaacagaataaaatcaaatgaaattaattaaatttaatggaatagagaaaatatacactatgaagctgaccaattcatgctatctaaaatagcatgaatagagtcaatacaagttcacaagtcaatataccacagagaggattcacgtctaaagaaaatcattagtaaactaacaaacacatcagagaagattgtactcactaataattaaagaaaaagcaaattaaaactcccctgactccaggcgcagtagctgatgcctgtaatccctacactttggaaggccaaggcaggaggatcgtttgaggccaggtgtttgagaccagcctgggcaacatagtgagcctctgtctctaccaaaaaaaaaaaaaaagaaaaagaaagaaagaaaagaaaattagttaaaaaaattacaagaaaaactgccctgagataccactagacacatattaatctagcaagacaaataaaacaaaaaaacctcaatggcctgtcacctttaacctaatatgcctgtagccaaaaagcttaaaaaaaaaaaaagtattcaatcaaaaatcagcaatgccaaaaaggaacaaggcctactcgtgcactgctagagacatgtgagtgagctcagtgttccatagggaatctggccatgttgaacaagaaccattgagatgtgactaccctgtaacccagtaatgccacgctagagaattttatcctgcagaagcaactctgcagaacaacaaaacaacctgtgctcaactagaaactgaaaactagtaaaatttctctcaataggaagatgattcagtaaattttcatggtgtatttttccaatggaatgccaccatttaaaaagagagatgggccaggcatggtggctcacgcctgcaatcccagcattttggaatcttcaccacgggtgcaagtaacgctccgccgagcccnnnnnnnnnnnnnnnnnnnnnnnnnnnnnnnnnnnnnnnnnnnnnnnnnnnnnnnnnnnnnnnnnnnnnnnnnnnnnnnnnnnnnnnnnnnnnnnnnnnnnnnnnnnnnnnnnnnnnnnnnnnnnnnnnnnnnnnnnnnnnnnnnnnnnnnnnnnnnnnnnnnnnnnnnnnnnnnnnnnnnnnnnnnnnnnnnnnnnnnnnnnnnnnnnnnnnnnnnnnnnnnnnnnnnnnnnnnnnctgtcacccaggctggagtgcagtggcgcgatctcagctcactgcaacctctgcctcccgggttcaagcaattctcctgcctcagcctccctagtagctgggattacaggcgcccaccaccatactcagctaattttttttgtagtttagtagagacagggtttcaccatgttggccaggctggtttcaaactcctgaccccaagcaatccacctgctttggcctcccaaagtgctgggattacaggcgtgagccaccacgcccagcccaagagatgaaattctatatccccatgatgacaacatatagtctgaggctggaggcatcccagaaagaagagaactaattaatatttgtggggactaccatggaccaagcaggatgccagacactctatatacagcagctcatttaattctcatgaaaaccttataaggtaggtaagcctttctcccacttcacagctgaaaaaactggggctcagagggcccatacgtcttccttaagtcacagacctagtaagttgtaggctgggaatctctgtccatgtctgtaagactccagttctatgctaatttttcccctaccccatagaagaaagggactgtgtttacttgaaattgatctgggttcatgggtttgtacagatgtagccctctgagtttgctggactactagtatgtaagctgggccctgggttggcaatatgccagtaggtcagagtctgccaggaaatcacattggctggcatgggtcccagcttaggagagggcagtgaagatccctgctggggggcagaattgggagccatctccaggacactgacatcaagaggagtgcacgtggagtccccacatacaggtatcccccatggagacagagaaatcacccccttgagttgagcttggggcaatatgcatgtattcagtccaagagagttggagaggaaaagggcaccacgctagccccatgtgcaaggctctgatggtccagttggggacgttatacctaggatcacacagggcttccaattgggttctgggagccaatgagctgcaaaagtgtttgaaaacatcccaggtggatgcagtgatgctgagtataaccaggctcgtgtggaggcctcaagctgctggtgacaatttaaagactatgcaaaaagatggacatccaagatctaactggtgagaatgggctttagggaagacagaaaggcatctctggaatgagtcagcctgtcaatgactgcagctgtgggtgggagaccatacctggactgggacaatgctggttgcttgtgagaactttgggatgagtcaggctggggagagaaggtgtccagggactgaagaccaacaaatgagaaagggacagaacctcaaagatggctcataggtgagatggggctgagggtgggaaccctcataaggagttgtgcccagtgtcttcttggtgcaaggtggcttcatagtggaggaggccttctgcccacccagcacagggggcaacagggatggtccaacccccaggctctgtggctgggtgacatcagggcctggctataaaagggtagcgaccatggacagtgctgactgcaagtcccagcagagttagggtaataaactaggccagctgcagcagcccctaggtctgcctacaaaagttatattactgcccatcccctcctgatacccacaccagtggggaagggcaagacttagagcaaaagagggatgggtaagacatttttcctccactaaggtcggaccctttccattggaactcaagtgtcgacgccagacagaagcttaactttcaccctgacccacagtgcacttctcaggctcccagccttcactttatatgctttggacttgagggatactgtcctgttctacttttgaattgctcacatctgttgctttgttcacctttcaagattctagattccgtcagggtagagacttgttctggaacactcttgtactgcccaaatgccaggaatatttggtaaactgagttagtctaaagaatgtgctatcctgagatctcactggttagaaaacagcacatcagctgggagagctaccccagatctttctcttactaattttttggaagttacaggaaaatacatgctcatcaaaagtgatttggaaatatgaagtgatagaaagaggaccaaaaaaaaaaaaatccctcaagtccctcaaagttttccaatcaaaagatttcttcctaatgttaagaccatgttccggctgggtgtggtggctcacacctgtaatcccagcactttgggaggccgaggtgggtggctcatgaggtcaggagttcaagaccagcctggccaagatggtgaaaccccgtctctactaaaaatacaaaaattagccaggtgtggtggcaggcgcctataatcccagctactcaggagcctgaggcagagaattgcttgaacctgggaggtggaggttgcagtgagccaagatcgcaccactgcactccagcctggcgacagagcaagactttgtctcaaaaaaaaaaaaaaacaaaagaaccatgttccactttgctatatgttgacagagcagtgagtatcatgcaggctggtttggagggagacctaacgatctccatgttgatcctctaaagggcagtgctatgggcctctcacaggctggacttcactctctggaacttatttgtaatatcagccttagccaccccaagctttacgccttcttctggtctctctcttggacttttgctgttgtgactcagctgaaattgcgaggcttgcagaagcagacccacactcacctttgccacgattccctctgcatgtgacacagacctctcatcagcctgcccatggaaaacaggccttctgtgccactgtcttcctggaccttccccaagtctcttggatccttccagaagttgggtaaccagatgtgcaggcagtgcctcaggactagacaagccatggcttgaatgtaaggttcagagacccctgtgctgtgcctgacacaggggagctatgactctgcaggggacaaacccaaagccagtatacttacaccattgtctctttttggaggggatgtatttaaaacaccctaaaagacaactagagaatctgttcaaagagctagaaaatcagagtgttaaggggttgaattgtattccacaaaattcacgtgcaagaaggcagagtttgccgtgagctgtgatcacgccattgcaccccagcctgggcaacaagagggaaactccatctcaaaaaaaaaataaaaaaaaaaaggagacccacacagagacagacacactcagaggagaatgtcatgtgaagacacacacagaggggagacaggcttgtgacaatggaggcagggattggagttacacagctgcaagccaagaaatgccaaggattgctagcaaccgctagtagctcggagagagactatggcctcctgtcagcaccttgatttaggacttctggcctcctgaactgtgaaagcattcatttctgttgtttgagccatcagtttgcagtaatttgtcaagacagccctagcaaaccgacacacagagtgaatacagtgtgtcccacagatggcggggtatggaagcgaagtgtggaaccaaaagtatatggccgtaaactttatgactagggtcatcctatgtcagaagtctataaaaattattcaagtaaaaactgtacagatatttcatacatttccaaaatttaccttgagacactctggttaaaaaaaaaatagtagaggtgtcttaattttcccaaatcagccaggcgtggtggctcacgcctgtattcccacaacttggggaggccaaggtgggtgaatcacctgaggtcaggagtttgagaccagtctggccaacatggtgaaatcccctctctactaaaaatacacaaaattagccaggcatggtggcatgtgcctgtagtcccagctactcaggaggctaaagcagaagaatcgcttgaacccaggaggcagaggttgcaatgaaccgagatcatgccactgtactccagcctgggcaacaagagcagaaactctatctcaaaaaaaaaaaaaaaaaaattctcaaatcgagattaggcaatgacagattgacattagggggctttctcagggatgactgtttcctacctctccttcagagtctaaatgtctgtaggctcaccatcatgtgcccaccccaacccaaaaccctcagaaggaaaatgccagtctcatactaaaagtgacccggctgttcagcagaaataagtagcacacagttaatagttaatccagggcttatctcctggcagctatatatcaggaaaggaccacttaggaaaataaaatggtactcagtcttgctttccaaaggtgctaccaagagaaaccctatctcagcttttcataggattagtcagctccaatctagtgtttggggtaacaatttggaggggaaaaccttcaagtcactccatcatatctgaagtgacatataaccatgggaagccaactgcccctctcaaagccaagcatcatctgctgcttttgcccgctgacaacactgctggtgagacaagccgctggtttgccaaaccctgggacactctgttgtccttaacgaaatggaaagtaacaaagccacattggtttataaataattattaggaatgaaactttgttcgactgtgatgtatcgaggcatcatggtgtttgccagcttttaaaaatgatcaggatgtcagaaagctgcgtggcaaggtatgtagaggttggtcatctggctcccacttcctccctcctgcctcttctcagaaagccagagccccaagctagagacatactgcgcaaatgaagcaggtgtcgtgccaagtgtggcccagggcttcgataaacttgtcgccagcctccacggggaaatcgcagccatggcacttggtgctgaacagattgatgtagtctgaaatgaaaagcagagtgaagaccccgcacccagtgggggcagcggggacccaaagccaagacaaaccccaaatcagtgggcagaagcagggggtgaaatctaattggttgtttgtcatctcacagatgaaatactcagttacatgactgatagttttccattttccaatcattgcattgatgttgttcagacccaggcttagacaccatcttgtgctggtttgatttgcaaacactttctggaattgtcatcaaccttctgcagggagattgtctcctctgcttctgtcacctctaatagaccaaacggatcaagccccaaagagaaaacaatccacatttccaaacatctatgcttagtttggaagaatgtgggtccaacgtatttaagagttatagaattttctttgcttggccattcttctgtcatggggcatttgtgttgacaacaagtttttactactataaacagtatttgaactactttattggggcatgtcctcctcctccttccctacccccaaccaaggagataatgctattaaatattattgatatgatgctttgcaatttaccaagcattttcacatggatggtgttatttacaagtatgtcaatgtcagggactacatcttagctttctttgcactcccagcacaatgcctgacacacagtcaatatccaaaacatatatagggaatgaatgcattaaccaatcaatcagttcatcaatgaatgaaactgatcatcacaaaatccctcagaaattgaactattattatctttttgttttgttttgtggatgagaaaattgagactcaaagaggtgaagggcccagccagcatcccacagctgaagcacagtgggtcaggttctgtgctccttcaccagggcagctgtcctctctaggcccaaaggggctacagttctaccacactgactgtagaacatctctagattattctagaaaagctccatcccgtttacaaagccttcatccctcctgagaagtgtacgcattcctccataactcttccacagttggctttttcttaagtgatttcctgttcttcttgtggatagtatgtccattcattgtcttagaccacgtcttactgagtgccagtgtgccatgggggttacaaaattggactctgaataaaggaagagctgggttcaaatcccaactctattaagaaatgttcaaacctggggcaagtggcgtaacttctcaaggcctcaaccttctcatctatataatgggaataattattgtaccgaactcatggggttttgagtggattaaataagataatgtaagtgaagtatttggcacaaacactcaaaaatgttggctcttattttgaaagtcttcataactgatgcaaagagggaaaggaacaatgatttgagtgccattatgcctcctgtttaatcctcatgacatctctgtgaagagataatattccctatttatttatctatttattttatttatttatttatttattttttatttttatttttttttgcgacggagtctcactctgtcaccaggatggagtgcagtggcatgatgtcggctcactgcaacctccgcctcctgggttcaagcaattctcctgcctcagcctcccaagtagctgggagggcaggcacgcgccaccacacccagctatatttttttatttttagtagagatggggcttcaccatgttggccaggatggtctcgatctcttgaccctgtgatccacctgcctctgcctcccaaagttctgggattacaggcgtgagccaccgcgcccagcctatttattttttgaggtggactctcactctgtcacccaggtggagtgcagtggcacaatctcagctcactgcaacctctgcctcccagggttcaagcagttctcccacctcagcctcccaagtagctgggattgcaggcatgtgccaccacgcctggctaatttttgtattttcagtagagacggggtttcaccattttggccaggctggtcttgaactcctgacctcaagtgatccacctgcctcggcctcccaaagtgctgggattacaggcatgagccaccgcgcccagcctagtattccaattttaaaggggaggaaactgactggagaggttccatcacagaagtcataaggagtagccccagtcctgatggactccaatgttcatcctccttctatggctttacgctgtctccagctccttatcagcatggcattgagctttgatcagttacacttatctcttgcatgtgttttccaatatatagcttccccttttgtgcttaattgtagcttgtcatgcaaatgctcttatgtatcccagtccatcaatcttctctgatggaacacttaatttctttagtaggcagaaatgcattgccttgccagagctaagaaaacatcgttctgcttcctttagaaagttaccgcccaggttgcagttcactctgtgctctgcaagaacttactactatctggtatgggctgacccgtctccacctgaggacaagccctgcacccacttacgacttctttctcatcactcccaggtggtctcatggtgccctggactttctcttacacctccatgcctctgtgcaaaccaggccctgggcttgaaaaaccatccccactttctgtacctgagagaatctctgcaatcctttgtgctaggctgtccttcagggaagtcttcatgccctacataccccaaccaagagtgatgagatggccttgctgaaggctttccctggccttccctcctccatttatccatgcatcctatccattcatccatcatctccttttttttttttttttttttttttttagattggagtcttgctctgtcacacaggatggagtgcaatgatgtggtcacagttcactgcaacctcaacttcctgggctcaaaccatcctcccacctcaggctcctgagcagctgggaccacaggtgtgcaccaccacggtcggctactttaacttttttttgttttagcagcatggggtctccctatattgtccaagctgttcttgtaactcctgggctccaaggggtcctcctgccttggcctcctaaagtgctatgattatcaggcgtgagccaccaagctgggctgtgttccatactcttacaataaactataaaaattaaattaaatggttcaaacaacctaatgtaaatagtgcattgccttctgcttactggcttattcacagactaagctattaaagtgggcctgaattggccaggtgcggtggctcacgcctgtaatcccagcactttgggaggtcgaggcaggtagatcacgaggtcaggagttcaagaccagcctggccaagatggtgaaatcccccatctctactaataatataaaaattagccaggcgtgttggtgggagcctgtaatcccagctacttgggaggctgagacagagaattgcttgaacccagaaggcggaggttgcagtgagtcaagatagcatgccactgtactccagcctgggtgacagagcaagactctgtctcaaaaaaaaaaaaaaaaaaaaaaaaggccaggcacggtggctcacgcctgtaatcccagcactttgggaggccaaggtgggcggatcacgagatcaggagatcgagaccatcctggctaacatggtgaaaccctgtctctaccaaaaatacaaaaaattagctgggtgcagtggtgggagcctgtagtcccagctacttgggaggctgaggcaggagaattgcatgaaccccagaggcggagcttgcagtgagccaagatcgcgccactgcactccagcctgggcaacagagcgagactccgtccagcccgtggtgaagacaaaacaaaacaaaggcttgaatttacctctggaatgccttgtcttgcccactgattcatttttctgttttaaatttgattccatatgatttggagaattatcgctttgttttaaaatttggtagcatgggtctgatactaacacatttttgtttaagttggtatttttcttcacaacttctgcaaaagttatttctgcaaaaggagaacattgctggtaccgaacaaagtctgtgcatgggccttttccacaaggagtataatctagctcttcatatatttattccttcctttatttctccctttaagtctttctaattttctttgactctctcttgtcccaagctgaattactaccctcacatttaatggattttattgctattgtaaaaggatttctgtccatcaaattgcaggtgctctgtgttgaaaaggggcttggtacttttctagagcaatggttcccaaacatcagaagcacatggagggtttgttgaaacacagcgtgccaggctcccctccagagtttctgattcaccagatctggggtggggcctgaagatctgcatttctaacaagttctcaggtgatgttgctgctggtgttgggaccacactttgagaaacacttctgattcccacacctaactgaaacacctgggtagggtggggcaccctacgaaatgctgcttctgtgggtctgaggtaggtctgaaacaatctattttctctctagtttgttaagttccctaggtgaccatgatgccaggtttgggaactgctcgggtgcaggttcatctgtgaagggctgacccacctatctctcttctttatatgcagatgtcagcttatctttgcagccagctgaagcatttttcagcctagaccctatcattctggctcaatctgcagatttgacaggactcccttctgtgtcttcttccaaattgttgattaaaatgacgagacgtaaaaatgaagtttcacctcatacccgttaggatagctactattttttaaaaaacagaaaataacaagtgtttgcaaggctgcggagaaattggaacctttattctctgttaatgggtttgtaacacagtgcagccgttatggaaaacagtatgaggttccttacaaaatcaaaaatagaacagaatcaaaaataggcacggtggctcatgcctgtaatcccagcacttcaggaggccaaggcaggaggattgcttgagccctggatttcaagaccagcctgggcaacatagcaagacctcatctctacaaaaaatgatgaaaattagctaggcatggtagcggatgtctaaagttccatctacaggctgaggtgggaggatcaactgggtctctccagttacctaggtctgaaggtaaatctgcttcctcactgtcttctcttaacactagaccgtcttcttcctggatcttcttactcaaaacatcatttttgagaatcttttcgggggagttgctatgatgaggggcagcagtgataatggaaatctatcattctttcaaaagcctcagacacaaattgcggcttatctcaaataatagaagttataatgcttttagtagaagaataacagcaagttgtataagcataacagctctttctttaactaccgatcaatatcatatgctcatgagaaaggaaaggtctggtattatcttctcccttttacagatatagaaactgaggcacagagtaactaagtgacttgtttcaggtcattcagttaacttcagagctgggaagggcattcactagtacaagaacccaagacgtttcttttctttctttctttttttttttcagatggagtcttactgtgtcgcccaggctggagtgcaacggcagtatctcagctcactgcaacctctgcctcccgggttcaagcgattcttccacctcagcctcccgagtagctgggattacagacgcccgccatcatgctcggctaattttcgtatttttgtagagatggggtttcaccattttggccaggctggtcttgaactcctgacctcaggtgattcgcctgccttggcctctcaaagtgctgggattacaggcgtgagccaccgcgcccagccaaaacgtttattttctaatttacagtcaggggaaagaagttttattttgttttgctttttcccttgaggaactgaatgttttctcctttctgattttaaagtaaactaacttactgtgtttctctttttgccctcaaatttgctacccagttagtccctgcagctctgttattcttcataatcagcatgcctgcttttcccgcctctgattttctggttctactgtcttagccttcatgtctgtgttaccttttctggaacctgcttcaaatcctttctgaagggggaagcctctgaataaatgagtgactgacttccacctatctaatgaagtgctttgtctcttgaatttacaataatttacttagcattttaagataacatatagcattttgggggtacagagaaactctgaattcactccgtgagattacaggaatctgcaggaacatcaaagtctgataaatatcacaggggcagaggaaggggtctcgcatatttgatgctctacacgccttctctggtttaatcctcaccacagctctgtaaggcaggtgtttacagacgaggaaagtaaggctcagagaaggttagtaacttgctcaggtttacaaagcagcccaaagtggaaccaggaatagaatgaaggacaaagtccacagccaaggccttttcagactagaccttgtggtctccaaatcaaaataacctgaaaggtttcccagtggtcataagatgccaacttgtgatctacatttttttttttttttgagatacaggatcttactctgttgcctaggctgaatacagtggtgctatcacaggttactgcagcctcgaactcctggactcaagcgaccctcccacttcagcctcctgcgtagctgagactacaggcacgcgccaccacacctggctaatgtttatattttttgtagagactgggtcttgctatgttgctggtgtcaaactcctgggctcaagcaattcttctgtctcggcctcccaaagtgctgggattaaggtgtgagccacctcacctaaccagatccacatatttgatgcataaaataagctatagactctgcacctcactctccccaaagctgcaaccatatgggcaggggagatagttaacttcctttgtgtgatattagcatgattctgccattaaaagcaaaaacaaaggtttcttccagaaataaaggcctctgggtggtcggatgtgaatggattaggcaggagttagttccctgtgcctgcccctttctcccaggctgtggggcctccccacatgccatcgaagtgttcctacctttctcgcagtagggctccccgtcttccatgtggaagaggctgttcccaaaaggcttcttgcaggccgcacagacgaagcaggtggtgtgccatgtctgtctcaaggcatgcattacttcctgggggaaagagcctaagctcaggacagaaaggagagagggagcgggcttgactaccccaccaggctccagccactgcccgagcatcctaccagggaacagggcaggagatctcaggatgcaggccttggtcactctgaagaaagacccaggggtgtcagagaaggggttgtcactctccagctgggtgccaggttctgtgctttcttacataaactgtgaggcttaatcctcccattaaacctgggaggaggtactgcttattactgtcatttaccaaaggggcattgagggttaaggccacattctggtgagtggtaaggtcaggctgtgaagcaaccacttgctttgcagaagttccaccaccacttcaagctgtgtggaacaggcacacaatcatctcttgcatcaagttcatttatccccaagtttattggtggcaaaccaattcccttttaggataaaaatggagttgctttctctgttaccagcaacttcttggcttcctaatgggatcccacgatcttggggaagggctggggaagagacatgggtcagaggaaatggaggcctcccacttacccccataattttggtgttgcacttggcacacagcggggcaaagaattgctcataacatcgctcacagtaaacgttgttctgctcttccacaaagcacacatctgccagggaagtcttgcagtaggcacaggtgaactcttcagggtgccaagaacggcccatggctaccagaaatgggcccctggggaagcacagaatggcacccagtaaggcagctcccagaacttggaattagatatttgaagaaccccaacactgtttatacttttacccaataactctgacttttgtgactgttctgatgaagtaatgtgaaattcagagaaagctccatgcagaaaggtgttcattgttgcatcacttacaataaagaaaatcaggaagcaactcaaacatctaccaataggggactgggtaaacatattatagaattcagttgaccactgataatgatagtaagaaatgcaataatgatgatgctgatggctaacatttattaagtgattactctgtgtcaggctctattcaagaagacttttgcatttattaacttgcttaattctcacaacaatcctacgcactaggtactattataatacccatttttagataggggaattgaggcacacagagtttgaacaacttgtttaaggccatagggctagtaagtggtagaccaggatacaaacttgtattgtctagttccaggttagcagtcagaacagtgggactatgaagacatttttttatattctaatttttacttttctgtgttttccaattcttcactaatgagtatgtattactttagttttaaataaaagtgtatttttcacgtatataagctcacaccacacatgcacacaaacatactgtattcaaacaacagcacccatggtccatggcttctaagtatgaaatcacttgttttcattttagtctggcagatgcccaccaaccccctgagcagcccaggcctgtctgtggaaagacccagaagcaaccctaaaggaaaactgggtcaaaaccaacactgtctaacaaaatgccccgtaaacctactgacaagcctggtgattcccagacctcaaccttagcccaagggggagttcctggcaccaggtatcctgctggagcttcacccacatacctcatgccattcctcccagctccctgggagagtgggtgtcacacaggtatggcagctaaggctcagagaggtaagaccagatggcaagccagaaggacccgaggctttctccctacacctgcctcctacccccatctctcccaaccagggctcagactgtgggcaagcaccccacacacacgcccttccagtgccccagtgcaggggcacagctggaccataccggatgacattgttgcagtgaccgcagagtggagtccggctgctggctgggaatcgctcagccctctggacggtccccctggcaagtggtggcacctgaggacccgctggggtgtaggctgggcctccccggggcagggtctgcttgctgatggaggtggtgctcttgcccggggcaaacttctgggagaagctatcatctgtcacccaaggtggacggctggcaggctccgcaaggcccccgctgtaggccaccgagggtgcagggttatagttgggggcaggtgagggggtataggctggtgctggggatggagnnnnnnnnnnnnnnnnnnnnaaacgagctgataggaagccagagagcaggaacccgaactattatggagaagtggtgtcacccctggtcaacaaccagggtacacgatcaggcacaccctgaatgacgtaccgtcctcacacagggcgacggaaccgggcaaaggcgacaccagacggagagacttgctccaaggaccgcaagaaggagacccgacaacgcgtgggaatcggccaggcctgtggagaggcccccggacaagtgtatgcacctaagcacccgctggagtgaaggttgggcctcacgcagggcagggtcatgcattgatgatgcagggtggtgctctttgcccgggggcaaagcattcggggaggagagctgatccgatcatgtacaccgcagggtgacggctggcaggctccgcagggcccccgctgtaggccaccggagggtgcagggttatagttgggggcagagtagcggggtataggctggtgctggggatggagtgtaggtggggacaggtgagggggtgtaggcaggggcaggggaggggtgtaggcaggggcaggggagggggtgtagggagtgggactgtaattggcccctggggacgggctgtaggtagatgcaggcactgcaaaagccaaaaaaaacccaaagaaaggtgtgtcaggaattcattcttcccagttcccctcactcctagccagagaaatgcaaaaggtgactttaacattagagcagtacaatttcagtttttttgggagacttgttcctgaacttcttgatggcccagatttgaattctcagcagggtgttcacagagctagggagcaagcacagcagaaccctcgacagggctggaaaagggacatggctataaatatttgcagctgtgcagggtggggctccgccaggccttgactgcccaaggcctgcataagacgcagagtgggggtgggggtacctgggcggggagaggtgggagtgggtcacctcgcctttgactgcaagatgctttcagttgcactctgaccagtgatttgacatctgaaatacctcccttggcataagtttgctgaacctggacctaggtcagccctcaggacaaaacaggtgacctggtagctgggttttcaggttcaggtttcaggtttagctacaattactttcttgaaaaacagcttggcttgatttgtattggggggcaattccgtcttggtttgattagggtgggggatcttgaaggagtcattcagagggtgctgggcagagactctagggtgacacagcctagaagtagctgctcacttggcccgtggctgccttgggggacccctgtactcccacatcgctttggtggaagctgagagtgtgtctgagtgactgtctaaagattgcccaggcagtcagagcacagggaagagaatgcaccacctcacttctatcaccccctcctccagctccctgagagcagaaaaacgttttgggctcacagcacagaaaaagcattgccactgcttacccacagccctctcccgcctgggccctcaacacctagccagggcagacccagctgcaccctgcaggcaaggtccagctggcttcctcttccagtgagtgaggttccagaagcctcaccacatttcagtctgctcctcagcaaagaggcctcattcccccaaccctaggaagcatgtcagcacagcctccctccccattcctgagctcagtatgggcaggatggactgcattgaggcagtccctgcacccacaccccgcctctgccccccaccccatactccagcctcaacctggagaggaaggttttccttagggcctaagaccctggccccatctccagtctctctttcccacctggttcccctggaccgcctggggcagcctgtggctcccactctgcaccttccactcccaggtgacccacccttcagagctgggtgagctggaaatccctgtgctgggggtgagtagggaccaggtagataggatccatccatgttgttgaaggaagaagagataaaaccctccacagccctgccctggagccatcctgccagtgaggccttcaaaagataataccggttgggcatggtggctcacgcctgtaatcccagcactttgggaggctgaggtgggcagatcatgaggtcaggagatcgagaccatcctggctaatgtggtgaaaccccatctctactaaaaaaatacaaaaaattagctgggtgtggtggcgggtgcctgtagtcccagctactcaggaggctgaggcaggagaatggcgtgaacccaggaggcggagcttgcagtgacccgagatcgtaccactgcactccagcctgggcaacagagcaagactccatctcaaaaaaaaaaaaaaaaaaaagataataccttctccataaggaatcttcctcccctttaggggtaacgaggcacatagcatctgtcatctgaatcggtcttcacattattccctctttacacttgaggtcactgaggctcagacagagctagtaagtgggaatacatctccaaatccattcattctatcatcccaagctgcctctgtaaagaatatgagtccaatttctagaaaatctcagtgcaacatgtcagggaggagtcattttcaacatgaaggagaccccctgctgtggagtcttgatagcatagccaagagccctggctgcaggatccagctctactacctcctggttttgtgtccttgggcaagttccttaacctctctgggcctcaatttcttcatctaaaactggcaatactgattcttagtatctcacaaggttattatgaggattaagggaaggtaagaaatataaagagcgtagcctagtacctggcatagtgtgtcactaaatgtgagtgaggatggcaaggatgggggcaacctgggtgtcagggtcagatgtactgtcagcctgtctcatggcctgctgctcacctagggaagcccagcccagttagactggtagcgcctagggttgggggagaggagggaagggaaatggaacatcctgaagtcagataacctgagactgaggtctattcagtggtggtggaatgcctgacaccctgcctgccccacagggcatgctggggacctgctggggtgacatagtgaatggattttgtaaatgtgtacagcccaaatttgaggtattgtcaccctccctaacaactttgcagagaatatcaaaatgctgggggaagaagtgattccaggaacaccaccagggacagagagcagggagaggtgatctagcacaacttcagagcagcttcatccctctgttatatataagggggttctgtgcaacattttctttcctttctttgtgaagtgcaattctctgctaaaaaagattaagattggctgggcgcggtggctcacgcctgtaatcccagcactttggaagactgaggccggtggatcacttgaggttaggagttcgagatcagcctggccaacatggtgaaaccccgtctctactaaaacttctagtagccgggcatggtggtgggcgccttgtaaacccagctactcgggaggctaaggcaggagaatctcttgaacccgggaggtggaggttgcagtgagtcgaagtcgtgccattgtactccagcctgggcaacaaaagagaaactccatctcaaaaaataaaaagattaagaccagaagccctaatcctgcggtgtccaatacatagtgctacgtggccgatgagcagctgaaatgtggctagtccgaccaagaagtgccgttagtgtaaaacacacaccagattttgaaggcacattaataattattttatattgattatatgttgaaattatatatatatatatatatttttgagacggagccttgctctgtcgcccaagttggagtgcagtggcgcaatctcggcttcacagccacctctgcctcctgggttcaagtgattctcctgccatagcctcccgagtagctgggactacaggcgcccgccaccacgcccggctaattttttgtacttttttagtagagacggggtttcaccgtgttaccctggtggtctcgatcttctgaccttatgatccgcccgcctcggcctcccaaagtgctgggattactggcgtgagccactgcgtccggcctgatatcttaaatatatgtagtcaaagaaaatatattaaaatgaatttaacttgctttcttttattttttaaaaatgtggctaataggaaatttctattgcgtggtgctgccttcaccaaaatgactgcttccacatgccaggccctttacgtgccttattactcgctgcaatccaaggaggcagataatatttgcaagtccattttacagatgaggaactgagacttggagagcttaaatggctgcctccaagtcatccagctggtgaactgcttagccgaaacgagctcaggctgccagactcaacagcagatgcccgcttagaaactccccaagcagcaaaacaggctttagtacgccccctttcaagtaaacagggccctggcccacctttcctgcctccctccagcaatactaaccctattccccctgcctggcagtcgcttccctccatcggaaggccttacagactcccggatccacctccttttcttttccagcccccacaacacagaggtctcacagaggcaggctagaatctggaccccgatttgacggcttccttgcttggggctaacccacccagagaaggaacctccccggcctcggtggcccggcccggcagctccgttcccccgtcgcaaccccgactccgtcggggggcgagcaggcagtggcgcttcgcagccctcagcttctgcatccttcagcctggctcgccgtcacgccaggagagacctgatatcccatctcgcagccccggggctgttgctatttttgcgtgacggaattaagccagtctaaattagaaggtgatatttcatctctaattggcaagttcaaaagtcccctatcgcactcggcgggctcggggatatgtaattaaacaaggtgatttctgactcacgccgggccgggcccggctctccgcaagcgcctggccgccgcccggcccgcgggccaacgtgaccgtccccggcccgcgcgcagggtctccgcgccgccgccgcccgccccctcccgggcctcaggtgttccggggagcggccgcccacctcgggcgccagcgataagatccggcctgcgaacgccgccctcggcccggaggaggccccggggggagctgcggctgcggccgcggcgctccgggtcccgcgcgggctccccgccctctctgacgcccggatccgaagagcctggagggaaggggagcggaggggggctcgggaccacacgccccacttcatacggggccgcctgccagccgcccccggactccgcttggcagccgggcctcccggagagggaggtggaggcaggccgactccagcgcgcgcccgcccggccgcctctttccccctaggcaggaatgagttaatgtctgcgcggcctgggaacggcgcgggggcccgcggctccggcccgtctcgctcgcctgggccccagcccgggaaggaggaggaaggagacgcagggcgggctggccgcgcgcccccggagccctgacgccgcctggcgggctgggcgaagacagccggaggccgccccggaaggtgccagaagcgcctccccaggaagagacggaaatgtcctccttgtgccccggcaaggcctcgcctccacccgccgcttctcctccaactcctctccagcctcccctccctgtgttcccagtctctgcaggggcagcctcttcccactgctccatctaaggcttttcactactgcaaaatgccacctcgccctgcggagttttcacctcagaaccgtctatccttgccccttctctgtagggacagagaagggcacctcccgtgtgacagacgctgtgctgggtgcttcattccatccccagaacacaaggtgtccatgaacagcgcagcctggatggatgaggcactttgccttcgagagcagagcaggccgtggcaccggcctctgtctcgggcaaaagccgcttcgaccgcccacactcagccctgctgtcagagcgagcttcatgaaccagcgccccgaagcaaggcctgccctgactcagtgcctgtctcatctccctgggctccagcggcagagaaaacttccctggggtttctccctgcgcctggataggacctgctcccgagtctaggctccttatgtgctgttctgtacccccatggctgcggccaaatctcgcacactggcatgacacagagaagatggagtctcattctgtcgcccaggctggagtgcaatggtgcagtctcggctcactgcaacctcggcctcccggcgattctcctgcctcagcctcccgagtagctgggattacaggtgggtgccaccacgcccggctaatttttgaatctttagtagagatggggtttcgccatgttggccccggcggtctcaaactcccgacctcaggcgatcctcctgccccagcctcccaaagtgctgggattccaagtgtgagccaccatgcccggtccggagaagacttctctgctctccttcgctctcccttagaatcatccaccgctttcttgctcacctgtctcccccagaccagatgcaggctccataggattctgacccacagctaggggacggagggcggagcatcattagcaaggccttgcttcccattcttctggggatgtgcccccagagccacttcttggctcttgtggctcctggagcccgcccatggctttcgacagcctcccctcctgctctgcctcttacctggctggtagacagaaggccggatgctggcagtggtgacaacccggggcttgggtgcaggggcggcggggccctcactgtagctggtgtgggtggcaggtgctgaagaggcggccactgcggggctgtaggaagaggcctggggcctggaaccaagcggggaggggttacacccagaaggacagcccccactggggcctgcagtcaaggcaggctggctcccaggtcttcagaagcctctgtgaggacacctgacagagacatttctggggaactgccagaaactgtgaaggaaggaccatgagggtcttggaggggaggaggatgttccttgggtggctagtgccaccgcctttggagagagggagaaaagccaccaggaggacaccgggaagacccttcactctcatggggagagactgtccaggtgggactgtggaagagcgcataggtaggggagaggagagagatggcgctggtcagaactacctacccccacgaccttgtggggcacctcagcccctgaccacctggcctcttctgcctacccttttctattgttgctggaaggaacagcaaagtctcaggtttctgggcacagatgctccagtgagagctcaggggaagtcaggagactgcccccgcctgctgcccaaggcacccccctctcccccaacacacacctcttctgcatagagttcctgttgccctcctccaactgggttagttttcaaggggcctagggtcacctttccccatgtgtggcccagggacaatggggtcaaagagattttaaaaaaagcgtcctagttcattaccctcaggagagtctgtgcgtcgtggcctctcctcccagagagctgaaggctctgagaactcctggaatccagcggcctgttgagccttgtctgatcagtgttccccaattgtatttgtttgtaaaatgcttttcttcatttaaaactaatgaacaccttgcagaacacatccctggtctttcagatctcaaaggggaccacatgcccacacccagggcaaatgggttattgctagaggtgctggagaagtgagccctgcctgccacccccacatggctttctgccttccttctgtctgttcctcaaggacctggggcctgccgatccctgctgggcagagctgtaggatgaggagtgccttcctctctggggctctgagaagggactggccctggcatgagaacccaccaccaagcttctgagtggatccagagaggtctgaggggctgtcccagacaaggcggagataaaatgagcctcagggagctggcatcccagaccagggggctgtgcacacttgccctgtcaagctgccgagtttctggctgagtgaagctattgtctcccctccccaggcccacctgcccttctctggatagattcctgtgctaagaccagcagagtaggggtctccatggaagaggaagagacagtgtccaaggggtgccaggcttccatagtgatgggggcgggccaaggtgcagtggtcttagctggactccatcattggaggacactttgcccacagcccaggagctacaggtcctgagtcagggactggcactgggaaagggagcagaggcttatggcatccattgaaaattctgaagccatgctcccatgaaaggctggggagtccatttgcctcccatgggctcccccacctcccgctccaccccagcccatgtgtgaggagcggaggtagctttgctcagagtgcaaacccgtgaccccttctgctccagccccactccccgctgggcagccagccctctgtgcccctctccaagctccacccaggtcccagctctcctggcaaggcaaagggaaggaagggaggactccccctgtggggggcatcccaagggttccaggagctcagccgtgggcaggcccaggacactgagacctaagcctggtgctggtgcctgcctttgagcagggttggggccccagggatgaggctagactgcctgcagggctccagcatttatagcccctcaccattcatattgggaggcttcttcccactcaaaaacagaggcatttcttgccctcctcaaagtttcatctttctgcaggtagcaaggcctttatatgaagagattctggtataaagaggggaagcagtgtcctaaatccccccaggaaactgggatgaaaccatccctggagggccaggctcctccttcaggcttgagttgggctggggaaaggttgggcttggcaccatgtggttaatgtgaagcccgggatgggggcagcagacaggcctgcaagccggtttgctcacatcaatcccacctcaggctgcaccatggacctacccatcctgatccaagaggcatgtcctccccagcaaaccgtgggggccagggtgggaggcctgggacacctgggctctgaccccaaacactaactggcctactcttggaagcccagacagagagctggccccatccagcctgatgcgccacatggccactgcagagtgacctgtcagcctggcctctctgccttcgctcttctcccctggcctttggtctctgcttgctgggtgtctaggagggcagatgcaggaactcacaatacttgtgtccttcatatgtattaggtgttttacagacattttttctatcataattctatataataagtgttaggtaaacatcttaacagatgaggaaactgaggttcagagagcttcagtcactttttcaaggttacacacagtaagctgtggagcagatataaatcccactataccaggtgcctctggcgttaacatggctgaactctctgaggaaatctgacctgccttccctgcccagctccaatgctgcctcctccatggagccttccttgatttctccagcccacagggacaactttcattctatctaatttgagttccaggaacaaagactttttccacagtccccttttgttatctaactttgtgtgtatgagtgtgtgtatgtgtctgtgagaaagagagagagactgttacctctctcactggtatatgtgtcagagagagacactgttacctctctcaccggtgtatgtgtccctggggggcagagtgacagtccccgccacagtggtgcacacccctgtaattcaccctcagtttccccttcacactctgcaccaagcagcgctggccttggcttcctctaggcctgcgggccctaactaccttggacacagctggccacaggtagacccagagtggggcgtttcctgcctcccttccccagggtcaggcccagcacctgtggcccagttaccttgggctgtcggcaggacttgaagcaggggctgtggtggaggcggaggcgatggcagtgtgggcagcagctgtggccaggggtggcgaagccgcactgggagaggcagcagcaggtggctgggcagaagcgggcagcagcggggtggtggcctggctggtgcacaccggcgcatgctcaataggggtgctgatgaggcgggaccaaaaagacaacaggtcaagggagcctagagaccctgtgaggcccctctgcatgggggcaggtggctgcagcagaggcaggctgggcagaaagctccacctgccttgcaaacagagtaggatcctcagagggtgtgtcttccagctcagggaaggagctcctccaggatcccaggagcagaggctcagaccacaggagggttccagtaacatcaaaaactttttcaatcctggaggaatttcccacccccacccctcaaatttttctgtacttcctaatttttctttttcagcaaaacagtgtggtagaaaggccgatggaattatccacccaggttcctccctgatcctgttttcacccttccccattcagtcagggggcatgtgctaccttgggaaggaatgatacagcaaaaaaagcagagtgaagatatttgagtgtcaagggcttaggctctggagttgtgagaacctaggctttgggctcggaaggactcagggcaccaacaagacagatggctgaaagctaccatgccaggcagagcaaggttacctggacaaaagtgggcactgtggcaaggggattcaagaatagaagcccctgtgccccttttcaaggtcaaccctgaggaagcagcaggaccccagggttccccatgcccatggtgaggggccaggcagacctgaaatagcccaaagatccccatgcctctgtgtggcctgggtgccctagaggatttgccatgcacccaagagtgacaagaacatggtcctgagcacctgcagatctgaaagaccttgtaactgggaaagagaaaggcgaccacactgccagtgtggaccagacgggttggggatgtctcagcaaatgccagtgcaggcagaacctgacagaggaccaggtgtgcccccacacccccaccctgagtgccttggcattctgtaagcacctcttccctagaaccactctaggaagacaagagcagtcagagctgggttgctaactgtaaaatggggtgggcagagaataaaaattaaattataggaaagcaaagaaatgcacattctttactctttgatttgtttttgcaataacagcaactggataaatgcagcttctgcaagtgggaatgactccccctacactatgcagtttgtttattgacctcatgctatgtgccaggaatgatgtctttacttcctcacagcagccctctgatgttggtatcatggactcttatttaatagatgaggaaatggtaacaaagagaattcagttgctcaaggtcctacaacttatcagtaagaatagcaggatctgattgagggatgttgtgatttgaatccttaaccggtacctcatggaggaagaaataaacctcttgttgtgatcagccaagtagactctttccccaataaaaggcactattcttattggaaataattagaataacaatactttgcattactaagtgcttaccacagtaaaagaaattaccctagccaggcgtggtggcttatgcttataatcccagcactttgggagactgaggcaggtggatcacctgaggtcgggagttcgagaccagcctgaccaacgtggagaaaccttgtctctactaagaaacaaaattaggccgggcacagtgactcacgcctgtaatcccagcattttgggaggccgaggtgggcggatcacgaggtcaggagatcgagaccatcctggctaacacagtgaaacctcatctctactaaaaatacaaaaacaaaatcagccaggcgtggtggtgggtgcctgtagtcccagctacttgggggctgaggcgggagaatggcgtgaacccaggaggtggagcttgcagtgagccgagatcacgccaattcactccagcctgggcgacagagcgagactccgtctcaaaaaaaaaaaaaaaaaaaatttagctgggcgtggtggcgcatgcctgtaatcccagctactcggggggctgaacccttgaacccgggaggcagaggttgcggtgagccgagatcatgcatgccattgcactccagcctgggcaacaagagcgaaattccatcttaaaaaaaaaaaaagaaattaccctattactcaattttatcatttaaacctccctgagccattgggattgtgaccctcattttgtagatgagaaatctgaggtccagaaagattgtgtctctagtaaaacatcacaaagctgcaaaatggcaaaaaagggcttggggcctcaccactataacactttgcaaacttccatgtgtgcttgaagcccctggggatcctgttaaaatgaagttgatcctagttgagtaggtctggggcagaactgagcatccacatttctttctttctttttttttttttctcttttttaaattgagacggagtcccgctctgttgcccaggctggagtgcaatgtcgcgatctcggctcactgcaacctctgcctcccaggttcatacaattctcctgtcccagcctcccgagtagctgtgattacaggcatgagccaccatgcctggctaatttttctatttttagtagagttggggtttcaccatgttggccagactggtctcgaactcctgacctcaggtgatccacctgctttggcctcccaaagtgctgggattacaggcgtgagccactgcacccggccaagagtccacttttctaacaggcttccaggtgatgctgatgctgctggtctgtatacaggccacacttggagtagctgacactaaaggggtctgccctagataggaatgcaagcgggccctcagctatttgcaaaagcattactgaattactttccttcatctggtgaggtgtatggtaaaaagggcatgaaatattgtgacagggtcacggaagaatggagctggagaagtggcaaggttgaggttgactgcccccatgggagagagagtgccatccttctccataactgcgtgggaagcttttgggatgggcaagagcagtggttacatcctgcccaggtcttccctgacttaatgctcagggaggcggtcttgggcagcccagcttgcaggcctgcagccgtgcctggccctggcccttccacgaacccacctatgaaagaacctcgcttctggaagccatgccggtgatgtgactgcctcagagaagtagctgcagtctctgtagccacgccactgagctggctgctcagaccctcctctcagtgtgggcaggtatggcctgggacggctcaggctgacacagaacactgatctcctttatctgctctccatggccctacaccacacttccagtaggctgctgggaaatgaggacactgcacaggacaaggacaatgacagtgtccaggctggggacaatattctgtaggatgaataggaggttggctttgcctgtctccttggctccaattcactgttaggccagcttacctgctgctctccgcagccagagctccaaatgaaccctggattccagggcatgaagttggagctggatgtgggccctaggaaaattcatcattgaccacagcaccaggacgatgatcaccaccaggtatacctgggtatgcacgtaagggagcctgctgcttggggttcttgctgagtagcatcctctctagcacactgtctaaagacaccaagaagccagggctagggaaggcagaggaggcatcaaagggtatcttgaaggatcttgggctcttattccaggtcagttcctgcctgaagttccacaaaccctctgaagcattctgaagggggcatcatagagcaagcactgtggagaacttacttggtcctggcttcattcctaaggacagtgctggtgagatcaccccatcctgatctaaggtctacagttgcctcctgccttagtcataattcagtttaaacatctaagcaaaaaccaaatcaaaccaaactaggcccacatgctcatggctccatggggggttggcgtggccaggagaaacacagcctgaccatcgtccccttttcagcttatctcttccctcagtctggtcagcatcaaggtggagcatgttgactgtgtgcccctgctcttccatggtggcccttggtggtgggaatggtggggtttggttgatgctgttattgataactatgatattatgtctggaaaggatgggaatggtggtggtgatgctgggtcttggggttgttgccactgggcttggtcagaactgttggtgatggtgggggccttgtgattggtattgacagtgctgaaggggtggttgccactgtgggggtgatgatgctacttgtgttagttaagatggtagagcatgaaaatctctgttgattgggtgatgatagaatgccagtcaggtggttggtcttgaaattattcatgctgccacccacctggtctatgttccaccttgctgcctggtgactatggctcaggggaaccctgagctgcatcactttgccccaggaatgctccatgcaactccagggcccacattgccattgtggtctagatgaagaacacctcatcagctatagtgtgaaaggcgccctacagcctttgctagttccactttccttcagaatgcattcaaaatcccatagcctgggagtctagatgcagaccactactaaccatgacatcctctgcattctctccattccaactaaaatgattaacttggggttctgggacaccacttctcatcagcacctctgcttgttctgcttagagtatctgtccagccttttgtatctgcttccacccaaattctaaccattcctgatgataaaatacactgacctcttcttccaggaagccttctttgatccaccacttggagggatgctccctgtctctggaccatacatgatcaaccttgcattgggaacacagccgcatcggccctttccgattcctttagcacccatagtagtcaggcacctccacaaatgcccacagacaccggatgctgaatgagaacatctctcctgcttatactgaggggtttacatggaacccagcctggggccccccagggcactacatgaaggggtctggggtaggtgggaaggcagggcttcaactaggtggctccaagagagctccgacaggctggggtctgggagcaggggtccaagagcccgccaactcttagtggttggctgaggctttgccagcctcaggatacccattgcccaggacctctctctatctggcagacccctgcccccaacccacccttgggccttgcaagtcctctgtaaaacatcagccaaatatgagtgtgttccaggaggcctagatgaaggcagcgggatgaaggctgcctggcccgggcatcagactgctggaggcaggatggggtgggaggccagaataggttggcagggggctttagggagcatctcagggtggatgggcaggagagagcggcctcaaacaccaacgcttcctggtgggattgcgaaggttcctggaggcagagggaaagcctctgcccaggcagcaggaatgggcgcagagctctggctagcccagccacagaaaaggcaggacagccttgagggctgggcctcagcatctgcttctaatgtaagtgccaccactctcatgtcctcagcctgtgatttcacacaatcagggacatggaattggcctggagaagctttgccatcatggggtactttctaagtggtcaggcctgggtcaggtgaatggggtgctagctagtggcttacagctcagcaggacatgagcctgaggcctggctgggatctttttggctgctgctgcccttcctagcccttcctaaatgcccaggactaggacaaggccacaggtgggtgggagctgggagcaagacccaggtggaagccttcccagccctcttgcctcctgccacttgagcaagaatctgccagggctgccttccatctcttttcccctgagccccagccctggccccctgagttcccttgtgaactgcttctcagcccaggtgtgcccactggagcccttctctcgcctctggaccaggatcgagcataagtagctccttcctgtgagaacagcttgcggggtgccttctgatggggtggggcaggacaatggctcagtctgctggttgcagcagggtgtggaaggagaggcagggggcattcgagtattcccatatgcactgtcctgtgggtgactaaggttgcccaatgggcctcagcacagattcccaccagccatcctcccgccgtgggttgcagctgggctcggaacctgtggggcaggagagcagcaggaccagagctgcgctgtgtcctggggccggtggacacagcccctgctcctcttctgatggtgcctgtcctctctctgtcccagatcatgccctcacagcccctcttgggtgggacacacacaggcacagcatgactggggcttggtgtggttcacttcaaatcttctttatttcagaacaagcatgcttatatgtacagaagagagaactatggagccagcacacacggtacagaaaggagggtgcatgcccccacctcaccactgccaggaggggtctctgcctcattaccctggggcttctacttcctcttcaaagagccctattccgggctgccctgagctccagagggcagcgagggagccgggcagcgccagggatcagcctcttccccagaccctgatctacgggtgactcattctaggaggggatgaggccaggagctgaggatggtgggaaactgagcagcggcccatccatttcccttggttctggggtgttatgccagcaaacccctcctgccctctctggtctacagctaaggccctgtgcagagggcaggggattgggctacgggctatttggggggtggcgagggttgccctggggaggtttggtgggtacagagctgcagggggctgggccccagcatcagctctggggtgggcagaggacagaaatgctgcggttggccatcagaggtgcccccagcagagttatacattgtcaagcatcaccgtggggctcacatgccagatctgtgtgggggtaaggatggagggagtccagcctgttggggtggggggattccaggcagccttttagcttttaacattaaggatttgggctgaaaggccatggtgccagttgcgcaatttggcaaaacgtgggctgttacgttccgtttcaaacctttccctgtggcacagagagagagagagagagagagagagagaaacagagacagagacagaaagagagagaagagagggagaatgaaaggggttagggaatgtgttcaccattcccctgtctaacaggtggggcagagggcatgggagggagggaacgggcttggagaagctatgcaatccatggggtacattgtaacccaggtcaggcctgggttaggggaagaccgagagtcttggggaccaggatggagggactgaagtccctgccttgagtgagttgggggctgtggagaagggacctggctaatggccctgagggcagactgagcaaagagggcctccctggtccatgtagtgagggctgggcagggctgctttggctgtgagctctcaggattgaaccaaacagacaggtgcacctcgcatgatctctgtcccctagctgggcatcaagaagaaggagcacctatcccccgtgatgaggcttggtgggcagacctgccccttccctgtgctgccctggcctcgaaaagcctcactgtccccagagagaagattttgcacacagcccctgcccacccctgctcgccaggcctgagcacagcctgggcacatgcgtgcatacccacacatactcacaaggtcactgtcacagatacagggccaggacttctggccacttcccaccagtggggcctcttggggctcaagccacacctgctcagctgaggccacagtacagagcaggcaagcagcagtcagaaacgtgggaatgaatggaggaagagagcacctgagaaaggccagtgccacaggcgtcagaatccaggccttccaggctggaagggccgatcacatcctccagaccagaggtgcccactggtggccaaagggccccatccagccacaaacacagtatgtttaacctgtacggtgcttccaactcaatttaaagattaatttctgagtccatactatgagatgcttcttagcaataaaagggaatagatgaactattgggacactcaaccacttgggtgacccccaggaattatgctgattaaaaaatggccaatcttaaatggtaccatgctgtatgattccatttatataacattcttgaaaaggacaaaattatagaaatggaggacagatcacagattagtggttgccagaggttaaggaggtgggtgggtgctggaggggagtgggtatggctataaaaaggcggcatggggcatcctgggtgaagggaagttctgtgttttgcctgtatcagtgtcagtatcctcgttgtgatattgtgctttcattttgcaagatgctaccattgggagaagctgggtaaagggaactagggatctctattatttcttataactgcactgaatttgcaattatctcaaaataaaaagtttaattaagaagttggctgggcgtggtggctcatgcctgtaatcccagaactttgggaggctgaggtgggcagatcacgaggtcaggagtttgagactagcctggccaatatggtgaaaccccgtctctactaaaaatacaaaagttagccaggtgtgatggcatgcgcttgtagtcccagctactcgggaggctgaggcaggagaatcacttgaacccgggaggcggaggttgcagtgaactgagattgcaccactgcactccagcctgggcgacagagtgagactccatctcaaaaaaaaaaaaaaaaaaaaaagaaagaaagaaaaagaaaaaaaagaagttggccgggcacggcggctcacgcctgtaatcccaggactttgggagaccgaggctggtggatcacttgaggtcaggagttcaagaccagcctggccaatatggtgaaaccccatctctactaacaatacaaaattagccgggcgtggtgtcacatgcctgtaatcccagctactcaggaggctgaggcaggagaattgcttgagcctgggtggtggaggttgcagtaagccgagatcgcgccactgcactccagccttggagacagagcaagactctgtctcaaaaaaaaaaaaaaaaaaaaaaaagtgaattgctagcatataaaaatcaggaagagcaactttaagtctttgaaaagaagatgtggcagtgctggccttctatttctgcacagtaacagtcatcggggctggcccccatgtccccacactcacagaggtcctcggttctgcacctgctttacctggcagtctctgtctctctctaccccttgaatcctgcatactgggtctctgtctaagactgtttgacaaaagggacccactgctaacatataacatatttgaaaaccaccagtctagtctgaactttccttatactaagaggaagctgaagcccagagaggtcacatgaatgacctaaagccacacagaaactcaggggcagaatcacaatctaagtgccagcgtcttcttcccttgccacatacctgcctatctgaggttggggtaaaggggtggagatggcatgagcaaagtccatgtggtggggctccttgagtcctgctgacagcactacaaacagtcctgaccatcccgtagacactaccgaggacacaggggcacaagatcagacacaggcagtttgcctgtaaatcgtcaagtcctagcaaggcctgtggaggctgggtgatagtttgtcattagtgcttagtgacagggacagggacagtcctggagagtccaatctagtgagcatgctctacttgaagctgtttaaaaatcctcagctagccaaggaaaggagccaggagaggaaggcacaggagagaggaaaagagacaggagagcaagagcaagaaagacgacctcccaggggctgctcaggcagcggcacctggggcaacatccctggtgctccagttgtggttttcaaactcgctagggtggcagaacaccagggactcaaaatccaaaaaagagaggtaattttttcattgctttcttacaaggggcccattggcgggggcacccattggcaggagggccctatgctgtgcggcgtgtaagcgaggtggctgcagggggggcaaaactgagagactgcgcagcagagggagggaagggggcatctgagaggctgcaggagggaagagggggagccagtgagccctggcattttattggaagaagcttaatggctgcatgatagaaaacgggcatggaaggatttttgcatgatctgggatggaaagggctatgtgatgcaccttcagctcctctagggactcttcactaagatcagctttgttcctaacgcttggaaagatggggagatgcagagctctttacccaggcaggcatcagggaaacgcagaggctgcacttgtaagggatcaggggcatgtctgggttacatgctgggctacatcctggatagttccccccagcagtgggatccagatgcctcgcagatccaagccctgccttgtccccacccctatccccaatgtggctgcccaatgtggatctgaccttttgagtgatcagggccctggaatgcctttccaaagtcagaaggaagctgtggcgatgactctgagattagaggctcagtttgtgggatggaggcactatttcagctacctccgatggaaactggggagccacagcgtcacctatacctactagagtagttcccatgtggaagtaggcagaaggctgatgttcaaggcaacctggacagtttcctaaggtgcctggtccttccagggtgggaagttcatagctgatgcctggcctgttcaggcctcccctacctcacctgtaaagagtccctggaaattagactctgtcttgggctagccagcaggttggcactggagcctcagatggaagctacgtgctaccagacacagagataccatcaggagccaggacccgagaggagaagagggctgtgagctgccctgggactctgggggtggaccttggaggcagagcagtgatggaggtgaagggaaagtttgcaaagtcttcttgacatgtgtattcacacttgacctcgaggtcccagagcccctgcctggtgcagaatgcctgacactactcactcaacattcccgctaactttctcaccacacagcaccaggaaggagaaagcacctttgcatgggcataagactgtgtaggtgtcaccatgcacaggattggcaaacccaggctctgctggagtgagacacttggaagcagtttacagggaagccttcctggggaaactcagccttcaagagagaccctgagaatccccgctgggatttgggaggagaaagagaaggtaggtggctgctctcagccaacaagatgggccaggagagtctaggggtgcagcttcgaacttgggagtggggacagatagaagtgtggctcaggcctctgaggagcaagacccctgaccagcctggaccagggtgggacaaggcatgttcccttctgctcagatagtgatgtaggtgagcctggggccccagtcatgaccagtgatcacacacactgctttaggcttcaatcacagacagattagaactgctacacccactgcacctgcctctgggtccatgggatcactgcttgggattcagtgacatgggtggctctgcccacgaggataactctccagaaattaaagtcagaagaagggagaggagcccctccagacctgggcagaggctggctgggtgcttcagagcctccactgcagggcctgagaccccagagagaggtgctgatggggtgagggaagttgcctgggactgagggaggaagctaactggagccacttcccaggccctcttccccagatttccctagcatgaaaccctgccgtagctgggggagaggctccgaaagctgccttttgctgaggctgaaccaaactttcatggggttaggccgctggtgaaaggactactctcccacccttcaattaccctcaagaccaggcagaacaaacttcaagagatgctccttgaaggagggaaggggaaggccaaggatgaggcctggggaccaccttcaacactgcctttgtgctctcctcactcaataactttgcagagcctgcaaatattccaggggaaagaaaagacaaaagtttgctgcaatgcacttccacagtactctttcccgttctaatgacatctggttaatgaggcacaagctgagcgtgactgccttgcatatcggagggaagcagaacattaaggaaccagaagggagccaggaaggcaggactctgggtctcagaggagggagaaaaaaggccccctgctggcctgttgctggaaggaacccggggggattttgaagccgcttgctctggggtgtgtgatttaaagacttttttatcaaatgtttgggaacatctgcattgcacactgaagcagctacatgggtggcttctaagaggagggcaagacaagcatgggagcagcacgcagggacagcggagcacagcgggaggggagagctgagagctctggcacttaaagcagctggagcttaacttttgagctaaatcaaacatcacttcatcgcggactctctagatgccctgcaggcactgaagggttaagaactgttattgggactgcatgccatccttagcaggcctgggaggaccccaccttaggcttggatgcctggccaaaaagtgggagcaacttgagttggcaaaagtgttggttcaaaaataaaatccacaagtctaagctggctccagagtcctactctgcacaggtcacatggccactgagtgttgggcctgctggttagcaagtacagaaagcttggcccaggatgggagggtgcctctgagccccagccccttgcacagaggctgccacaggatgcactggcccaaggcagacagtgccgggaagaacatgcagatgacatatttgctaccggaagtgtacatacaatcacaatgagccctactccttaccatggaaggccccagcgggttccagtgagttccaggatggcatgcccccccccatgcccacctcatgctatgagcacctgacgggccacagtggtaggttggtggctgtggcctcagacctgcaactgatggggaaaccatgctctaagaccccagcttggcacaaacccatcctcatgtccagggcttgttctttttttttcagcaactattttgctttgagcaacttacagaactggtacctcaatgtgggtctggacaggtgagtccaggggtcaggcgttcacgtccagcacagccccctgtgtgcctgtttctcagtgcccagccttcggaatcatagggggacaggccctgagatgagtgggtgggcaagttggccagccgggtgtcctcacagggaaagttgccctcattctcaacagcccagcaaaggccaaagcagccctgccccctgcccagggatgaagctgggagagcccagagccttcgctcttgtagcctgggcctggaggacagagactcgggtccaggtgcccacctcactgactcacgatgctgcctcaagctagtgtcagctggagccctttgcaggccaggctttccaaatccatgaacttgagaggtcccttccatgagtgatgtgacctgggggctgcccggggagggacggggctagagggcaaggccacagagcctgagtccaggcacttaccttgaccttcgcagagcttcttcatcagggtcttgcactgttggtagaaaggagctggtcaggggactcacgggagacacagcaaggaaagctgctggggctctgtgggcactgagtccccaggattcagccaggccccacacggtgactgcccccttgcctgtccactgtgtgctgggcagaggccccagaggacattgggaaagagtcagggggtagcctgagagggcctcatcccagccctgggcaatcatctcgcccggaagttgcacaccaagcctgctgcccactgctggagttggcattggagcagaaggctgctgtcaccggacagcctgcctgagaggcccagaaggagccctgccagccactgacaaaccatcaagcctggcccaccttcaagggcaggtagcaggactccctggcttctgcagtgctgggcccaggtccctggtggcccctcagcatctccctcctctgcagccaccctgagagcctgcactcactgaattctgtccccgtcatctgggccaggatgcggaaggagcgagactgcaggttggaggaacggcgtgcccactcgtcagcctcatcttctggcttgttctggctcttaatcacagcctggtagacgggagaggcgctgtctacggcaaggtccttaatagggaggctcctgtaatgcagagagaggccgtgggcgagggctaggctggagcccagttcccaccctgctgggtccctgctccatgcccattggtggcccctatcgttctgtccccaccttgcctttatccattgctgtctgagaacctgagatatgggcatgacctgggttctcggtgctcagattggtcgcagtgaagcagtgactcccctccctcatgagagacaggaggctcagatccctcaggtctgcccttccccagtgctaactccaggcctaggccggagacatttccacccctagattccctttacagagggaggaaacagaacaggtcttctttgacctccgtgagcaggccgtgagtttggggctggctggagagaggccaactgggggacacagaggattcctcaggatccatctcctgccctcctcacacttttggatccaaacaaggagctgccaatgctgtcactgccctggaaaaggactgggggccatgggctcagtgtgagtaggctgactctgctggaaagtggtaagaaacaaggcagcaaggcacagccctggcatggcctgtagggacaggggatttctggcctggggaagttgggagtggggctgcatggaagccactggtcctctgtcccagagaagcgcagccctttgtggaggaccaggtgaccttcccttaggctcccagggtctggcacatgataggtgcacaaaactcttggctgaacaaacaaatcctacatcagagccagaagggaccctagagcccctcgggtccagtgcctcccagcctgaatcagactgcagtgcaggccatggtcaaaagccttacagcccactcaccctggccgggggaccagaggaccaagccgcccagcccaccttctcagaggcctgggagggctcaggtgaagcccacaacagtaacagactgctggcccagccctctcctcgtacagatgctgaagctgaggtccagagaggccagccaactagctccaggttacagcagataagggccccattgggtgagaacctaggtttcctggctgctagccctgtgtcctttccattaggctccctgcagtcatagggctcaggaaggctacttctgcccagtgggaggccctggacctatgcctggaaagatgccctgtccagtactcttctgcctgcctctcccttttccccagagggctggctggctgggagaggaaactccccattgtccatgtcttataccctccctgcaaggagtgtgacagggaactgaccttgtgtcccaggactggtccctgtgtctggctcagggtgggctacaagagcagaggtggggaaaggtgatcgaggttgggtggagctgccctggcttcgctgaaggccctgccctggcccagagagctataggtactggcagcctgtggttgggatcggttgggaaagaccagcagaggcttctagggtccggccagggaggagcctgcagctgcccagggagcaaaggagagggtgggatcttgctgttgctgggacaggccatttctggcatagggaggagtcccaggcgttcctaaggtctgggtgagatgggcaacaggaaggcacaaccaggtctccctggtcctggctcctgacccactgggaggggagggaaggagggagtgtgaactgtgcagtgggtgagggaaggtgtggatgcaaggcccttgagcctctctacagagctttgcaatccagagagcaggtggaaggtgtttgctgctgtttccctggaatgtgcccaggaggagctcccctgtgcctttcttggctccaagggttcaagaaagcatttctggcttcatttcccacaaccccgtgcaaagaccagggactcttgttgctgctgtgaccaagactgggagtcagataaggaaactgctgtgcctttcatgacaccaaggctcagggagaatatatgcagggaagatggaacaggtcctgcagtccttggcccttggcctgagtccactctctggacccactttcagcttgttcttcttgccacagaaaacactccacagtcaccgcaacatcaggtcaccgctgcatttgcttcactgtgtgcagcccccagtctgattcatctttcccctcccatgggtggtcatggcaggcactggctcctgcagatacacttcccatgaggattctggggagtggcctccaagaggttaccttgtcaccttctagccctgaataatggcccagtgtgcattctaatgtccgggtctacactgttccagtgcagataggaaaggcggggggagctaccccaaagcacggcaagaagaacacaggtatgcacccccagcctgggcctgcagcatgagtgtcactactctgtgatttctgtgaccacagtgacattatttggacaaaccccaagagacaagtacttgcctgtaaaggctgcaagggatgtcgtttggctgacaggtgggtgtgaggaggagcgtggacagagcacgtgggctgaccactggtcctcagacacatcccaccaaacccacacacaccatcccacaaccagacagacggatgactggacagacactgcagggtctacttacgccagcggtgacgccctgccaagcagaggaaaacccagccgtgagtgcgcgtccatcatgggatagcagaggggcagcgcacacaagagagccgggttagggtcagaaacgagttatgggaatggggtgggtgaaggaggaagaaaaagagaaaaaacacggtcattgaggaaggaaccacggaaattaacagcagaaatgggagcacgttatggccaagaggttactcactggcaccacagcatggtcagctcagcgtggctgcgttaaaaggaagaggagaagaggaccctttccaggcataccaggggaggaatagggaggggatgggaggggacaggagggagatgggaaacgtccttcgtgaagtctcgattaatcaacagtgcatcaattccaaaactgatgggtgccctagtggtgagacctaatgatagcagtcttcccaacgtgcagaaaacagaaagttagtgaagagcatttctttcattattctccattgaacttccctttggccattgctactacttttaagagcacaccaaggacacacgtgacaaagaaatgttaacaggaaatccctgttagctcttgggcttaggcagccttgtttttctgggtacgcatgagctaatgcttgtgtttgtaaacttgcatggtcatattttctgctttgaatgatggaattcaatcaaccttgcccagaattaggcgaagagcagcagccctgagccttgggagtttgacttgaaactccaggacaggcgacctctgctccctggtggcctagaggaagtactgcatctccaaaagggccccaggctcctcagttccagcagagcccagagagcccacactgttccacccttggggctggggagcctgccctttataacctgcatgcatatcatggccacaagggctggggtctggaaaggccaagtgcaactgggttctctgggactttttaatccctccatccctcttattacatcggtttttctggctttggaaaaaagcatcactgtcatttcaagactttttgccttgaattgctaggggatcctgacccagggataagatgttgcccagactgataatcagccaacacagtggtattcccaagtagaaaacagtgaggaattatgtgtatgtgtgtaaaaaagaaacaacagatagacaggacacatacacacacacacacacacacacacacacacacacacacacacacgagggtcgggggagggagagacagagaaaaagcaacaaggaggaagacagaaagagacatacagagagagggagacacagagacacgcagagagaggtctgtctgcatgaatgtttgcattgctagcatttttcatccacaaatgattttcagccaactctttctttaccaaccctcaaattccccagccatagctaatgggtgaattccaggaaccaaggatgtcttaaatgccactgccttgaggccgggcttcctagggcaaaaagaaggggattgctcccatctgtgggactgattgccagcagtagtgtggatggttggtcgcagaccccttcccaaaccagaaacccagccagtgtatttgaatcaattctcattgctggaagaacctggtaacttccccctccttaaaggacagcttcgctgtgagaggcctgggggcctccagaatggtccccttgttaagaggactgtagaagtctcttcttccagcctcctcatagagcctgggaaaatgcagaggctgtgaaaagcactttgaggagccaccattttctgcatttctccacccttctcctaaagctgaccatggagagggtctgaagagaggatacccacgttccagaaggccctggtgaaggctggctcccctccaagggccatgcctccaggaggtccaacgtgagggaagaaagctggtcccgatggtgcccaatggcccatacccctcgggctctggaggcactgagtggcggtggaggagggaggcgcttacccactgaagtcactgccttgggcttgggcctgcccagcgatggcatccatgatggcatcctgggaatacatgctgatgggcgtgttgtactgcgcatggatgatggtggccttgccgcccagccccttcacctcgatgggcttgtgggtggacagggccgagtccttcagggcactggggttgaagcgttcctggtagtcggcgctgggggaggggtgcgggagtacgggcagggagagggaggagaaaagggcaacaggtggcggttacatgggtggccaaggcaagggctgggcgcggtgggtgtcgagagagatctcccagagccgaggccctgaacccccataggctacacaagtctccagatggtgggtggtctgggtgtattcaagaaaatccttggcaccctcccccaaagcccagtgcagcagaaggttttcttttttctttctttttttttttttttgatacagggtctcgctttgtcgcccatggtggagtgcagtggtgtgatctccactcactccagtctcaacctcttgggctcaagtgatcctctcacctcagcctcctgaggtagctaggaccacaggcatatgccactattttttttttttctgtaaagacagagtctcacgatgttgcccaggttggtcttgaactcctgacctcaagctgatccttctgccttggcctctcacagtgttgggattacaggcatgagccaccactcctggccatagaagggtttccttgcccatcttggctttcccagatcccctgcagtgcctggctcagcctgagctccctcccagggtctgcaggggctgccaggcacagagagatctcccactacacacagcaggggaagcgcgggcatggggctgggggtaggggtcgggagcagcagcccaagctgagtccagaatgccccaaaggcgaaaagcggctccactggcacccgcagggattctgagcaaggtttctccgtgaaggggctcttcctgcaggccacccccttggtggcccagggctctgatcttccagacgcttcagggaatgtgcttcttcctcagagcagggctccagctgcccaggccccctcaagtccagtttgctgagtagctggccatcctctacccgcaggaggctcttccctccaatggataggtgcgctccccgggcagacaagatccagtgcagcccttctgaggggtcgccaggacagaaaggtcttcaggctcacacaggcccagcagcagcacagcctgtgtccccctccccctgcacccgccaccgtcaccaaccccaggcacatcttaagcagctgctgcagcaggaaattgggaatgaaattagaaccatcggatggagcccccactcccacccccaaatgcttctactccagcttcacacatgcaggctcacccaggggtacaagtgtaccccactcatacatatgcacatacatgtacacatgccagcaggcacactctatccacgccagacacacgcagacacatgctggggctggcacgcaagcgcacacacatgctgtcctttgatactaacttggctggagagttgactaccacctggggaggaaaagggcaaagaagacagggtggtcagagagaggctccaccaggggcagtttgagcgccggggccatcatcagcctggtcattgtggaggcagaaccagcccaaaccgcaatgggtgaggagagcaaggagtgaggagggagaactcagagccgggaatcacagctactgggaccctcggtttggttcagagactgacacagcaatgtttccctcttgaggggtccccagtgccctctgctttgccagaagaagggttttcttgtctatcttcaggggcactcgtaccgcatacatgaatcccccacatacaaacctggctatagaccccagagtggaagctaggggtggagacaggaccagctgtggctgctatggaaaaggctgaggcccaggggcctccctgcctgtcagcagctccggactaagagtctgttttgtgggggcagctctggaattctgtcctgagcaggcattgcagtggtaaggaggcagggtgtgtgcggggtttcctatgcccccccaaacctgacctcctctccctcccagaagagacgcaggcagctctggctgctcctcttggggtataggggagtggggtgcacagtcaccaggggccactcctaaaggccccttgggccagcaatgaggcaggatggaggagcgagcaggcgcagggagaagtgtgagctcaacagccgaggcagcacagtgagaggccccttcctctcactctgacctgagagtgagcctcccagagcatggtctctgtagggaaagcagtgtctgtcctgtgtttctttaaatgcaaattccctgcagtggcagaccctgtggccagcagccctgtcgggggcctgtgagggagacagtgtggaaggtggggggctctgtccccaaactctgccaccttcttgaatctgcccagtgtgggctgtagctgggggagcttgggccccggccagcctggccctggtcatttgcagccaaaccctgggaagccaggctcaagtcagtggtccccggtcccagggagcagcacagtggccctgctctgccccaggcccgccactgcctcagaactgataaaattccctctatcctcccaggctcaaaatagctgcaagtggagctatattaggaaagggccagcacggagctccattccttctccatttttggccagtgctgacagctgcagggtcatctcttgccctgaccagcccagggccccctgcagagggcagtgttggcctggcggggtgggggctgcctctgccctcccttggcagcctgctccttctttgacatttattcctgcctcctgctcagcttctcccacccaggacctggggccgggatggtggcagcagacacatctgagaggagccagtgcctgggtcttggggaagatgagccaaagatgtaagacctgcccaggggcccttgcactgagtggcctgaggggcactgcccttcagtgccagcctcagaagggaggagaagaagggggctgctgggatgcctatgcccgtctgcccttgcaccacatctgtttctctctcctccttccaagaggatacgaggtgccaaagaattgcactgcaagttgcccagaggagagagtagcggaaggggcttctttttggagccagacaggacagagttcaagttgtgaccctgcctcttcctagcactgtgactccgggcaaattacccacccgtcccagcctgtttcctaattctaattcttgagatggtagtgcctaccccgcaggtgggttgtgcagactgaacgggtcatgagtctaaggtgctcagcatgggagaagtgtgccatggataagcacggggattagcccttgctgaccctgttgctgacccacttagcataggtggtggcctcagcccagcagaggttgccctaggccagcccaggtcagaggctccagcccttcctgccggcattgcctgagacagcagcatcagcttttactttggatgaagcacccactgcacatcctcccctagcccaccatcccttggaggaaacgtcagactctgctgctctgagcaccaagaaataatttacacattcatcagggtctgggcagcccctgcaccgacagcagagtaccttaggcactatgggaagcagaggtgggcctggcccctcacttccctgagcaggcagcaagtccctgtctcaatgcaaagtggagtcaggcagacctgcatgccagttctgtctgccacttactagctgtgtgaccttgggcaaattacttgctctctctgagcgtctattttccagctataaaatggggaaaatcatgcccacctctggagttgcagagagagttgttttagagagtgttgctgagagataaggcatgtggactgttagctggtccatagccagagtgcatggtcagtatggggagacattatcatcattgcaggtgggtctcctgggagtcccaggccaccagaggctgacctctctgcctgaggccagttcctgaaaaggaccgggaagacctaccagcccaacaaatgcgggacaaggaggtcatctctgttctactattccctgagttttctggcaaaagtcctttgctggggaaccctgggggcatatatggctctgtcaccttgggtaagggaagcaagccatgtggtgccagaaatcagcttcactgaggattctagaaagagctgggggggtggggaagctgagggccacagggagcagtgacctgatggggcacaggtgccttctgctgcaagggcaaaggcaagggcatgggcttgggccagactgaccggattcctactgtgactcttctgggtggctccaggcagtgatgataccaggtgtcatgcagtgagtgggtgacagacaaagctcagagctttacaagtgttgggccctttatcctcccaataaccctgagacatggacagtgtgattcctccatgattcggaggaggaaccctgaaccactaggctctactgccttgactcagcctgccctgcctggagagggctatgccaattgcacagggcgggagtagaagttagggtgagagaacaagcgtgaagggctcagagctaacacaggcccagtgtggggactccgttcctttgcctcccccctacagtgccccagtcccatgtccttttacctgctgtgctcccagagtcccgccagctagaccttaggggtgaggctgctgttctcctgcacagcccctttctccttggggtcctgcttcctcgccaccccaccctggccaaggtcactcctgcaaacccgctccctgcacgccactgccaaagagtctctccatatacaattcaagggctccctcctccaggcagcttcccagactattcctagtcccagataactcgcttttccacctctcgaacgctcccctgctcctgcctccgagctcccagaggggtggggacctgtgcatagctcttgaaggctgcaggctgtgctgtcctgttctggggagtggcctagtgaaaaagtgttggaagtcagaatctcctgaattcaggactggctcggccacatggtagctggacaaacggactgtgacttaaccttctctgagcctcagtttcctcctctgcaaaatccgacatgtcaccccagcgtggttggttgtataaatcgctagcatgcccggctcatggcaaatgccgcaggatcactgctgacctcatgggctcggggctggctggattggggccagtgcctcgctctgaccacctgaccaggtctctgccgagcaccgaggacccaggtggcccaggccacctgtggagagctgtatgtccgttacctaccctcctgggagtccgacacccgaggccttccctcggaggctcatctggtacatctgagccatctccctcagggtctctgccgagtacaggccaatggggttgttatattgcctcggctggctcgagcccggcagggcttttgggccgagtaggtcccgggccccctctgggctggtcttggccctcaggctggcccgcggagggccagggtcagaggcctcggcgagtgaggagaaggcggagggccgggagaaggcagggctaaaggtgggcctgagctccggggtgcctggggtgcctgggctggccctcgcctcagggctggggctgggtgccaccaggctgccgttcgtgtccagagcggggtcctggcacagggcaggccatgcaggggagagagaagagagcggttagaggccacacgcgtcccagcgctcctgcgtggacctgaaacagatgtgttagcgcgagccccgcagcctgaagcccagagcgcctgggcgcagcacttggaggggaggacactggtggaggagcaggcaggcacatggctcctggcctggcgtgaggctggcatccagctgggcagagtgccaagccctgcatggaagccaagccaagcttcctgcccccagggcccgaggaagtgggtgtaggggtcaggggatggcccgttctgtgtctgttccccctgcccctgagagtgggtgcccagtgggcacagcccagcctcctgctccactgaccccacactgccagtgagatgaagttcctgggctggttgtgggcaggtggtggggaggtgaggagggaagctgaggaattgggtagctcacatttgggcccctcagtctacctctgcaagcatctcccaagcagccctccacccacttccccagtctgtgacctaccccacccctgtcagcctctttttctcccctctccccactgccctgcccaatctgccccattggacaggtggggtcactatcagctcacatagggggagaagttgagcagggagccctcgggggttgagctgcttggcggggccttgggaagggcctaggcagtggtgaggtctggagccagggcttggcctcccttctcccctgtgcctgccattgccagcacgtcctaagggctacaggggaatgcacttgggaggggcaggtggggaagtggaaaccagagggagagatctgggtgaggccagcaggcccctccacacctggaggtcctcgtcaagctgggcctcagccacagtcacccagcggtggcccccttggcaaatgaaggtcagagcctggacgctcgtcccctgcctggccaggagggtgacccctctcctgggaacactgctgcccaagctggcttcctatcagcccagccacgaggcatagcggaggtggcttgcacccaggcaggcattcattcccacatccagtgttcaacaggggcttgaaagtctctcccaaggggctgcctcacttccccagggtcagctgcagcaggggcagggatggggcagggctgatcccacggcctcatcccagttgggccagccaaagaccaggcaggctggccagggccagcactccaggaaccagggctgagtggaccccgccgccacagtcagcacctaccttctggtgagggatcaccggcagaggggtctggactggaggtgctgtcgtggagatgggaatgggacgctttgatctgtagaaaccagaaatgagaccaggtgaggaagttgcccctggggccagaagctcctgcctgggcagggctggtgaggagagagcaagagagagccagagtcagctctcagagatagctgagtcagagggccccagatccactgtccaccccatgggctggatctccccaagaaggccctgggcccgacgaggatggagaaatcatggcccctgggcattttggtcagaatccatgggcccctgctacgtcactgggggctgcctgggcaaagtggaagtaggtaagacctgccttccaggaccaatggcccacgtacgggcagcaccaggaccaccatctctgccttaactgtaaagtgaggcagtaatgtctgcctctaggtgcttgacagcgacttgggcctgttcattcctctggcccagggctgtccttatcttcctgcacagttttgtagcccagggcggggcccactcaattgctatgggacaatccctcttttggcccctgccccatgcccacacccaaacctccgccccctgctctggagagctcccacctacttctgcagggtgaggctcaagttgtagctggcagacttgatcttgttctgggcttccaggtgggtcatggtgtctgtgttgacgccgtcaatggccaccacgaggtcaccctggctgagctgggactgggctgccttgctgcctggtgtgatctgattggatagtggaggtggggggtgagcataaggaaggtggtcctgaggaaaggccagtccttggggaagagtcacccgggagtattcaacagaagccgtcattgtgtttttcattcgctacggccagtaccagctgctaaccaagcctagttcctctttccggcacatgactaccacattgcttagagctttgtgtctgactgcagccttgggactagctctggccaactgaatgagggtggaagcaatgtatgctccttccaggtctgcctctagcaaccatccttgtgatcctgcacactctctgcttgttgactgactgaatgcagggcatggagaggaggagagatgattaaggagcactgtattggacgttgcatgaatgagaaacttttgttgttctgagccattaaggtttggaggctgttggacatggtggctcatgcctataatcccagcactttgggaggctgaggtaggagaattgcttgaggccaggagtttgaggccagcccaggcaaaggagcccagaccctgtttctacaaaaataaaaatatttggcagggtgtggtggtgcatggctgtagttctagctactcaggaggcaggtgagagggtcactccagcctaggagtttgaggttacaataaactatgatcgctcaccactgaactccagcgtgggtgacagagggagactctgtctcttaaaaatttgcaggcatctgctgggcgtggtggctcacgcctgtaatcccagcactttgggaggccaaggtgggtggatcacaaggtcaggagttcgagatcagcctggccaatatggtgaaaccctgtctctactaaaaatacaaaaattagccatgcctggtggtgggcgcctgtagtcccagctacttgggaggctgaggcaggagaattgcttgaacccaggaggcagaggttgccgtgagctgagattgcaccactgcactccagcctgggtgacagagggagactcggtcttaaaaaaaaaaaaaaaaagggtggccaggtgtggtggctcatgcctgtaatcccagcactttgggaggctgaggcaggcagatcacctgaggtcagcctggccaacatggtgaaaccccgtctgtaccaaaattacaaaaaaaattagctggacatggtggcatgtgcctgtagtctcagctactcgggaggctgaagcaggagaatcgcttgaactcttgattgaacccaggaggtggaggttgtagtgagctaagattatgccactgcactccagcctgggtgagagcgagactctgtctaaaaacaaacaaacaaacaaaaaactgcaggctatttgtaaccttgattagcctcttataacccctgcaccctgcaaagctatggagcacttttcagactccaggagaaaagggagatgcagcagctaagacacagcagcatcccagagacactgccaggctgaagggcaggataaatgcacccactcaaaagcatcttagtgccaggtgctttgtgctacctggcagatgtggagagagtgaggtagccgacaaccctgcctggatgagcaaactcagctgggaaatggggcagggcttagggttctgtagttgatgtcatacctccagaaggcagggtgcaggtgcgggggccagttcccaaaccctgagccccgataataccacagaatgttacagtctggaggccccatcttcagtgtaaccacacagaatgccactgcaactccatcccgggaattccccatggaatctcaggaaggccacacctcctgggacattacttgggatgtcatcgtggctcagactgcactcttggggacatcatgcacgatgccaaattctgcacccccggcctccagtaatagcacactgaatgctttggtggccctgcccacagtaatatcacatgagatgcaaaatttcagaggttctaataatgtcacctaaaaaggcttgatggctggcccctagtgacattagcagccccacccctaaagatacctcatggaatgccagagactctggctgtaccctctgtgacatcacatggaatgggctggcccctgctaatatcacatagaatggctttatgacctgactcccaccataccatgttggaggtccccaacccccatgacatcatgaggagtgccatgcaggcctggccttcagggacatcacaggaaagaggaggctccggaccccaccccctacaagctgtggctggaagtgttccttggctttgcctcccaaacatgcccaccagccagtcctctgggcttctctgggcacatcccagtcaccttcctggctataacccaaggaccaagccagctcctagtgttggcagaagctagattcaggccaaggcccgagaaccatcctagaaggagcccagagaggctctggggacagtcccttgccccaggtgccaagcctgggtgggcctctggccaggctctgggcttacagacatgggtggaagctcctgccagtcccctcacagggaagccccttccaaaccaggatgccctgcagtcaccagtcaccagtgtccagcccattcccagatgggctctgcagatgcagcccaggaactgagttgtttctgcacgaccacattacgggtcacggaaacactgccctacaccacgtgggtgatgacggcaagaccaggacagccctctccaattgctgtgaacctgccatttcagccctaggggctgtggtgccctcttttttttttttctttctctttttttttttttttgagacagggtcttgctctgatgcccaggctggagtgcaatggcatcatctcggctcactgcaacctccgcctcctgggttcaagcgattcttctgcctcagtctccccacagtagctgagaccacaagcgcatgccaccatgcccggctaatttttgtatttttagtagaaagggggttttaccatgttggccaggctggtcttcaactcctgacctcaagtgattggcctgcctcagcctcccaaagtgctgggattacagacatgagccaccacacccagcctgtggtgccctcttaaaatactggccaccttgtgcccacagcgccccttcccctgccctggaatctgcagagacaggaaaggacaatatagaaacagacgtctggactgccaggaagccacagcatctgctttgcaaagtccagcttgccctccaggccccgcaggggcatcttagagctacttgagatttcttaaaatacacatagcccttacccccagactcattgccatagcctctattaatgacaggagtgtattgctgccttgagtgtagaggtgaacaaagtgtaaaaaccaacatcagtgaaggaaagcaaaagagttttctagactgagaggggactcctgggggcaagttgagctgcccagccaggcctgtcctgcagaaaatcaactttccctactcctctatgtgatccccaacattttattatagacatttttgcagatttctaggcaggaaaagtagaaaacattctaaagtgtacacctgaacacccgccaccatggctgtaccataacatttcactcgctttgctttatcacactccatccctccacatccatcaatccatctcatttgccgggcatttcaaagaaagttgcaggtaccagcatacttctttccagggcgaattttgcaatgtctgttctgtcctagtgaactgcccatggggctcccccacagcaggacacccccacagcaaggctctctcacggcagggcacccccaaatgcccatctacagagaaggggtcgtccccctgcagggctgggtcattgcagaccccacgcagaaaggctgtggcctcggtcacagaggagatgctgacaggaaagatgggagttgtgtccagaagatcatgatgacagcatgagcaagggcaacagaatgatatccaagagaggctggggccagatcagaggggccctctgcagggctatctgactgtcctccctctggagctgcctcagagacatctttctcccacaggcatgggtcagcgggcaccagccctccccaccaggtctcctcacttcccctcacctagacctgcctggctctccctcatcctcaggtatgggccggggggatgcttgctcccaagggagagctcagcctcctggggtctggtcagtagccaagcctctgaccagagggaagtggctgagctggatcccctgcccagtgcctctcccctgcagctgtgtctgcttgtcagggctcagctggcctggcctttggctgccctgagtagggtccaacatccctcagggtgggggctgggggtgctgatatcctcctctagggaggtgcttcaggcaggatggaggcagggaccctatggatgatcaggagccatcggatgccttcaccccacctcaggagcagcctgcctgggtgggttggaggggggcaccctcagacccttgcccagagtccagggctcatggagagtgcagtccaggcacgatgcttccacgtctgtcttgtctgactccatcctcctctttcctttctgtgtttcagaaagggcccaaagcacccaactccttggagctgtggttttttctttttaatctttctagccgcctttgagcatttaaatgcctcccttgaatgagtgtttcattcccacttcacatttcagtcttatcccgccaatgggcccctctaaaccctggaaacccaaccctgggtgcagcctagaatggcctcagggtggggcaccgagctcctgtctccaaagctcccaagaaaggctgcaggtgtttggaggccaagatcagctccctgcccccaggagcccttccgccttgctgggccaaggtcttagggcacttccaagggcagcccagggagagctggtgccagagccacttgtgagtgctgggggctgggggcggggaggcagcaaaggaggagcacaggtgccagtatgggccgggcccctgacttcggtgccagcctccaagccctccagtgtcaagagaatgacaatgcctttctcgggattgttgtgaggattatgtcgttaaacaggggattatgtaaggagggtgcagagctgagagagtttcaggaaaactccaaatccaggaggcacagtgctgaccccatctgctacccccagaaggtgtgaggctggctggctacatccccgggctccacaggaaacaagatccacagctggcagagggtggagcttgaggagccagccctgactgaccagttctgagccagcctgctgtccctagaggggcctgggtgttggggggaggggaggaaacttctgtccaaggcccaggggaaagaaggcaccagtgaggcttcagacgcacccatgccatcggctcctatttccccagttccctggcagcagagagagcagctgggctctgcagacgtttctggccatcattcactcccggtgttcaaaccaggcaggcccctgccttcctcctcttctagatgtgccagtgtagatgtggtgggtggaggctggggcaggtggcagataagtaggaagggtacaagtttcagcagctccccctccccacactcccaggctgcctgcctgggttggggcaggtgggacaaagtgcattttcattgtatgattaaattactgtcttgtcctgctctgctgccttcccatctggcctcccctggggctttgctcatgctcaccctctcactggaaccttctgtctccccatggtcccactccccaactccaccctggccgataaataagccggagtcccctcaatgctcaaaaagcctctccctgcctgcctgggtggctccaactggctcctgtcatgtctcctttctgcacctccagactcctccaagaagtgacccacacatcctgcccccactgccgctgcctcccacctgctcacacacagccgtctgcctttggccccattattccacgcatatcaatgaccttctgtgtccaaagccacgggtcactgccccctctgtagctgaccacacctcccctggctttcctcaagtgtctcttgagtctctcctgcctctcttcctcctgtccaggtccacagttccatttgggtcttgggtgtggccaataaaatgccctcatgggcactggctctcaagggcccccagcaaggcccattcttgtgtccaaggatggttcctgggcagaggtggagcctggtcccaaaggggtgccaaagctgtgtttgggggtgggagggctcagtgtagaggagggtctttgcagtcaggggcagcctctggatgagaggggaccatgcagaaagggaaggagactcagggaattggggagctagcccccagcagagcctggcccagcctttctcaaacagccctgcagtcctgacactggctaccccacaatatctgtaggcccggagccctggggctgcttatgcagctgcccttgcacggtgtcctggcccaggggcctccaagggtccaattcattccccaggacccagccagcctcatgtcctctccttttggatccctcacagagttagatgcagttctgagcagcccggaggacctggcctgggggacctctaagaatgcattccccagctgtgagcctctgagcctctggccgtttatcttcccctgttgatagatgttgcagggaggcccctgccagccccactgaagccctcggaggcttgcctgaccttcagtgcggctataaacagcacggcctgtcagcactgctaagagctgcccaagaaacagcactgcgtgctccagcggccccgaaattccaggaattgccggcacagctaccccagaatagtctcagcctgtcccccttcctctccccagagaccctctgtcctcagcatgttcccaccacagctgggagagtctgataaatactggaaccgaaacccacagagaagaggcctctgagctggtgctccaggtgagcctgcaggcggggtggctgagaccctaggaagagagggtttccagtagacaggcaggcccctcctgggcccaggctcagcccccgactccaccagtctcacaaccagtcccagtagacaacaggtggaaagttttcacaagtgcctgttagaaagagctctcacaggtgtggaaggcatcattttatttgtttatttatttatttatttttaagatggagtctcactctgcccccagaatggagtgcagtggtgcgatctcagctcactgcaacctctgcctcctgggttcaagctgttctcctgcctcagcctcttgagtagctgggatcacaagcatgtaccaccacacctggctaatttttgtatttttagtggagacagggtttcaccatgttggccaggctggtctcaaactcctgacctcaagtggtctgccccctcggcctcccaaagtgctgggattacaggcatgaggcaccgcgcccagcctgctatccccattttaagggtgagaaaaactgaggccgagcaggtaaacagacttctgaggtgacacagctgagagcagcagagcctaacaaagcatactcctcttccccaaggcggaggcatgagaggcatgaagaggtgagaccccagaccacagccccagcctctggccagctgccagggcagaggcctttggagctgctccctctctgggctgctcccccttctccacttcctggagaactggctggggtggggtgaaagggcagctcatgttgcaggcccagccacacctgtccaggataaataaaggcatttccccgccaccctcctttcccagtctccctcttgaactcccttctctgtgggtctgcaagcagagaccctatgaagggatgccttgaggggctgctgctgccccaaagttgctgccatgagcccccgggagccaccacccagcctgcaggtggcctgtgtccttccaggaggagctgcagcacacacctgcagctgagaggggacagaccctccccagtgcctctctattagtcccagttagaggggtgagcaagccagcatgggagttaggggtgacaggatacaggagatccacccatggacatccctgtcctgtgagcagactcgagcctcagtttgccaggctctgaagcgaggtaacgatcccagcctcgcctgcctgcccaccccacagggtcacacactcttgcctctggtgccctatggcacaggctcaggtcctggctggggtgggagtggggttcctccagagagctctggccatgcctcccccgtagggggatgtccctggtgcagaagggccctgcgagccccggcagtaaatcctacagccctggtgggatggcagggctgtgtccacaaggcctgccctgccagcggcactgaaccaggacacaagcccaggctatcagcagcctaccaccaaaatttctcaagaggctccgagccctggggaaggctccagtacccagtccagcctgctccgcggcttaggtgatttggggtatgcccctaaaggaagccgagaggccatatcatgcccatcccccggtgccctgcccgagcttcgggttctatttttagaagtccccccagtcattggatccagcacatccctgcataccccctccccagagtaaggacattcctcctgctatctagcttaaggcttctgggctgccatttaagcccctggctggccggggccaggtggcacatagaccctgggtgaggtcattggctatcctgagtgccactgagcccagtggccaatttgcacccatagggatagggcagggagcaccagcaggaggcctcgagatggtggagctgggggagatgtgggctcagtcccaggcaggggaggccacagggcccatgagagagcacgcagaggctccaccttatacaggaaggagtcctgcaagcatgggggtggggagctgtgggaaagggcagtgggaaatccactggggctcacatgctcacaggtcaccacctcatgcaaagtgtgcaaggctgtgggtgcccaggaccctgtggtctccagggcagtagatctggaggggtggaatctccaggttagaacaagccacatctgcaactgaaggatggaggtcagggcctgttccctgcaccagagccaggccagcacccctcctgtaagcatgtggcctctatggctattataaggctctcacggcatccctgggtggggcttctacttctggggtcccctcaagtacccgtggaacaaaaaaagagattactcctccactgggggcattggctcctgacccgctgcccaggttccctggcccctctgccaagccccttcaggccttgcccacttcagtgcttcccctccaaccccttcctccagcccccaggcccaaggcaagtccttaaggccccagagaagaaactgtccccttgttcccctggtgggcagtagcccagatacccctgcctacctaccaccctccagtgacagactgggggcctccccctctggccttgtgcccggaacagcacggtcaggggctcagccaccaggcagggttgtccttgccctgtatgcctcacagttcgccctgagccttggggccttcagccctgggtctaccagtgccttgctggggagtctctttgtttgacagaaactgacggagtgcctactacggtctgggggctcttcccccatcagtccctgctcctggagtgcttcctcaggagcatggctaactttctgcctctctggtgttgctgtctccagccaggcggtagagttactcagacaacccctgatgttctgtgtcatctgcatcaggccatgctgctccccatcacagacactgcaggatagggggccatctcaccaggccccagcacttgtcgggaacaagacctgagacagacaaagcagccatggtgaatggggagaagcgcccagccccatgagccagggtcttggtgtctcaagtttgggatggagcgggtgcccagtactcagtccagcccagccccacactctgacagctgggcagccaaggtcaaccgtctgtctgtccatctatccaactgcccatcacctgccctctccatgctgggaatactcccttcccaaagcagctgcccatatctagggaaatgctcaaggcttgggggcaccctgagcccactctaacagtaaagggatcaggaaggtgctgtactctctgtccagctacctgcctgcctgcctgcctgcctgcctgcctgaaaactcagcattttcttctctgctaaaaacacctaccacctgctcatgatgtctcacatgcataacaggccggcgcgctccagtgagcaaacagctgtggctgagaccagaggaccaggccagtcccaggggatggggcatgctctgctttctgagaggctcagaaaggacagacagacagacggacacacatgccctcctccaagcgtgcctgccccatcgggtgccaggctgtggcagggtgcactcacccgggagatagtgaggggcatgttgaagtccttgcccccctgcagacggaagccccagggcccgggcccagtcagggtcacactgtaa

SEQ ID NO: 299 - DNA, 6327 bp, Homo sapiens
taatagttttttgttttgttttgtttttctgcctatgaagttgccattcttttattcctttactttcctaatgaacttgctttcactgtattctatggacccgccctgaattctttcttgcacaagatccaagaaccctctcttgggaaggaggtgggggccgggagcgcaaatggcgttgagatggttcagggccctgttcaaactccagcactgaccattcaccggcggaagcggcggcggggagggaagttgcggggccgccgctcctgcccccccaaccgggcttcctatttaccgaaagcagagtccctcgcctctctcggctctcacctgccggccctgctctcccgcgcgagggttccgcgcccgcccgcgggccgtagggagcgggagaggcggaggcggcccgtggccaaagcacccgccaggctccgaggagaatatgaaactggtgtcaaaatgacatccagatttgggaaaacatacagtaggaaaggtggaaatggcagttcaaaattcgatgaagtcttttccaacaaacggactacccttagcacaaaatggggagagaccacatttatggctaaattagggcagaagaggcccaatttcaaaccagatatccaagaaattccgaagaaacctaaagtggaagaagaaagtactggagatccttttggatttgatagtgatgatgagtctctaccagtttcttcaaagaatttagcccaggttaagtgttcctcttattcagaatctagtgaagctgctcagttggaagaggtcacttcagtacttgaagctaatagcaaaattagtcatgtggtcgttgaagacactgtcgtttctgataaatgcttccctttggaggacactttacttgggaaagaaaagagcacaaaccgaattgtagaagatgatgcaagcataagtagctgtaataaattaataacttcagataaagtggagaattttcatgaagaacatgaaaagaatagtcaccatattcacaaaaatgctgatgacagtactaagaaacccaatgcagaaactacagtggcttctgaaatcaaggaaacaaatgatacttggaactcccagtttgggaaaaggccagaatcaccatcagaaatatctccaatcaagggatctgttagaactggtttgtttgaatgggataatgattttgaagatatcagatcagaagactgtattttaagtttggatagtgatccccttttggagatgaaggatgacgattttaaaaatcgattggaaaatctgaatgaagccattgaggaagatattgtacaaagtgttcttaggccaaccaactgtaggacgtactgtagggccaataaaacgaaatcctcccaaggagcatcaaattttgataagctgatggacggcaccagtcaggccttagccaaagcaaacagtgaatcgagtaaagatggcctgaatcaggcaaagaaagggggtgtaagttgtgggaccagttttagagggacagttggacggactagagattacactgttttacatccatcttgcttgtcagtttgtaatgttaccatacaggatactatggaacgcagcatggatgagttcactgcatccactcctgcagatttgggagaagctggtcgtctcagaaaaaaggcagatattgcaacttctaagactactactagatttcgacctagtaatactaaatccaaaaaggatgttaaacttgaattttttggttttgaagatcatgagacaggaggtgatgaaggaggttctggaagttctaattacaaaattaagtattttggctttgatgatctcagtgaaagcgaagatgatgaagatgatgactgtcaagtagaaagaaagacaagcaaaaaaagaactaaaacagctccatcaccctccttgcagcctcccccagaaagcaatgataattcccaggacagtcagtctggtactaacaatgcagaaaacttggattttacagaggacttgcctggtgtgcctgaaagtgtgaagaagcccataaataaacaaggagataaatcaaaggaaaataccagaaagatttttagtggccccaaacggtcacccacaaaagctgtatataatgccagacattggaatcatccagattcagaagaactgcctgggccaccagtagtaaaacctcagagtgtcacagtgaggctgtcttcaaaggaaccaaatcaaaaagatgatggagtttttaaggctcctgcaccaccatccaaagtgataaaaactgtgacaatacctactcagccctaccaagatatagttactgcactgaaatgcagacgagaagacaaagaattatatactgttgttcagcacgtgaagcacttcaacgatgttgtagaatttggtgaaaatcaagagttcactgatgacattgagtacttgttaagtggcttaaagagcactcagcctctaaacacacgttgccttagtgttattagcttggctactaaatgtgccatgcccagttttcgaatgcacctgagagcacatgggatggtagcaatggtctttaaaaccttggatgattcccagcaccatcagaatctgtccctctgtacagctgccctcatgtatatactgagtagagatcgtttgaacatggatcttgatagagctagcttagatctaatgattcgacttttggaactggaacaagatgcttcatcagccaagctactgaatgaaaaagacatgaacaaaattaaagaaaaaatccgaaggctctgtgaaactgtacacaacaagcatcttgatctagaaaatataacgactgggcatttagctatggagacattattatcccttacttctaaacgagcaggagactggtttaaagaagaactccggcttttgggtggtctggatcatattgtagataaagtaaaagaatgtgtggatcatttaagtagagatgaggatgaagagaaactggtagcctcactatggggagcagagagatgtttacgagttttagaaagtgtaactgtgcataatcccgaaaatcaaagctacttgatagcatataaagattcccaacttattgtttcatcagctaaagcattacagcattgtgaagaactgattcagcagtacaaccgtgctgaggacagcatatgcttagctgacagtaagcctctgcctcaccagaatgtaactaaccatgtaggcaaagcagtggaggactgcatgagggccatcatcggggtgttgcttaatttaactaatgataatgagtggggcagcaccaaaacaggagagcaggacggtctcataggcacagcgctgaactgtgtgcttcaggttccaaagtacctacctcaggagcagagatttgatattcgagtgctgggcttaggtctgctgataaatctagtggagtatagtgctcggaatcggcactgtcttgtcaacatggaaacatcgtgctcttttgattcttccatctgtagtggagaaggggatgatagtttaaggataggtggacaagttcatgctgtccaggctttagtgcagctattccttgagcgagagcgggcagcccagctagcagaaagtaaaacagatgagttgatcaaagatgctcccaccactcagcatgataagagtggagagtggcaagaaacaagtggagaaatacagtgggtgtcaactgaaaagactgatggtacagaagagaaacataagaaggaggaggaggatgaagaacttgacctcaataaagcccttcagcatgccggcaaacacatggaggattgcattgtggcctcctacacggcactacttcttgggtgtctctgccaggaaagtccaatcaatgtaaccactgtgcgggaatatctgccagaaggagacttttcaataatgacagagatgctcaaaaaatttttgagttttatgaatctcactgtgctgttggaacaactggccagaaatctatctctagagtgattgaatatttggaacattgctagctgctttacctttgcttcaggtgctcggtaatgctggagctatccttagacaaagaaaagtcaagtcatgaaagaagtccttgaagatataccaagaacattcatcagtatcattcgtgtttggatttttaaggccacctgatttcttcgtcatgcattcggcatttgctaaatgacagttactacatcaatctgcaactatcaaaaatgaggggaaaaggttcaggctgttaacaattccatgcagtatttaaatacatttactttggcagagtttataccctccccttgttttcttgctttattctgggcaagtttgaaggggaaaatttgtgctgctgttagtgcaactgctgtgtatgttgagccactgttgtcatgccagccaggtgcaaaggcagcttagctactgaggtagcgaatgttctgaggacattctagacaacagcttagttcctttttcaggctcatttgcttttgcttttttgttgaatgattccaatcgtaaataaagcttttaataattttgtgaattttttggttgttgttccctgaactactgtctatatttaaaattagatggaatccaaagatacacgggattaatagtatatttttttattcttgattaggtttgggttattgaactattttttacttttgagaccacaaccatattcaatatcataccataatgtgtcatagctataggcacaagaaaaacaacagtttgagagaatattatataagatgatgtgccctgttaaaaggaggaggcaaaatagtcaaacccagggtagtttacacttaatgctagggaggctcttaaaacattattagattttgaggaaagactctctagatatattttctaatgttcagtacaataaatataaggaagctaaaacaccaatgtggaattcctgtttccagataacatgtatattcttctatagagtgacaggatcaattgcataagcgcaaagccttaaattgctggtttagagaagacccttttttcattcagattctttgttcgtagagcagttatttgaaaaacagttatggaacacaaaacattttatagatttaatatcataacattgcaaatttttcttgtattattgttcacaccactggttatacttttttttttccttttttattgattgggcctgaatacaggctttctagagatctttttcattaatacttttaaatacctttcaggtagttacatcatgtttcttcattggatttgtaaaacttgaagccataaaaatattagtttggtgtgtattggggaaaatagctaaaagtctaatttttacccatttagactttgttatttccttgtataaagtgacaaatcggggctcttgtatcagtgccagctgtaatgtttttaaatgcagtggctgccttctattgtcttcctatttttgataatgcagattgttgggaaatctgtaaggaagtaactgattccaggcaaattgttttcttccttctacccaccccaacccctacccatcaccttttaagaacatagtacgccagtgtaacgtgggaaccattgagattgtatttgccctgagtattaaagctagcttagcaaaatacttttaaaaacatattggtaaatgatacccataaaattaaattagttatattttattttaaaatgcaaaatacattgatatttattaatcattggatttagggaaagggacagatttttggtgaacctgacttgtggcagatggtaaggaatattataaaacatttggatgagaacaatcagggcgaactgcatttttctgttacactggtaatcatttgaaaattgatttacctcagtgtttaacagttttttgttttgttttgttttttaaataataactaattgtcgagcactgatagagatgcagattttggtggggggaggtggtgggggagataatcacttcaccaactgcagtgcatttgtgtgtttttaaccctcagagaactctgcattttagggtacttgaggctgacttaactaaaagttttaaagtaaccttttttccattgtaaatatttctgtaaatactaccaattggaaattagaacagtagagtacttttctgaatccaatcctatttttattttatacagtatttctcagctgtgatctttggagcaaaagccaacggcaggaaaaaatagtttgtaccagtttcatgaagtatgtctttgggtttttgtaaataattttaactcaaataaaattgctactttcaatacacat

SEQ ID NO: 300 - DNA, 3828 bp, Homo sapiens
atggttcagggccctgttcaaactccagcactgaccattcaccggcggaagcggcggcggggagggaagttgcggggccgccgctcctgcccccccaaccgggcttcctatttaccgaaagcagagtccctcgcctctctcggctctcacctgccggccctgctctcccgcgcgagggttccgcgcccgcccgcgggccgtagggagcgggagaggcggaggcggcccgtggccaaagcacccgccaggctccgaggagaatatgaaactggtgtcaaaatgacatccagatttgggaaaacatacagtaggaaaggtggaaatggcagttcaaaattcgatgaagtcttttccaacaaacggactacccttagcacaaaatggggagagaccacatttatggctaaattagggcagaagaggcccaatttcaaaccagatatccaagaaattccgaagaaacctaaagtggaagaagaaagtactggagatccttttggatttgatagtgatgatgagtctctaccagtttcttcaaagaatttagcccaggttaagtgttcctcttattcagaatctagtgaagctgctcagttggaagaggtcacttcagtacttgaagctaatagcaaaattagtcatgtggtcgttgaagacactgtcgtttctgataaatgcttccctttggaggacactttacttgggaaagaaaagagcacaaaccgaattgtagaagatgatgcaagcataagtagctgtaataaattaataacttcagataaagtggagaattttcatgaagaacatgaaaagaatagtcaccatattcacaaaaatgctgatgacagtactaagaaacccaatgcagaaactacagtggcttctgaaatcaaggaaacaaatgatacttggaactcccagtttgggaaaaggccagaatcaccatcagaaatatctccaatcaagggatctgttagaactggtttgtttgaatgggataatgattttgaagatatcagatcagaagactgtattttaagtttggatagtgatccccttttggagatgaaggatgacgattttaaaaatcgattggaaaatctgaatgaagccattgaggaagatattgtacaaagtgttcttaggccaaccaactgtaggacgtactgtagggccaataaaacgaaatcctcccaaggagcatcaaattttgataagctgatggacggcaccagtcaggccttagccaaagcaaacagtgaatcgagtaaagatggcctgaatcaggcaaagaaagggggtgtaagttgtgggaccagttttagagggacagttggacggactagagattacactgttttacatccatcttgcttgtcagtttgtaatgttaccatacaggatactatggaacgcagcatggatgagttcactgcatccactcctgcagatttgggagaagctggtcgtctcagaaaaaaggcagatattgcaacttctaagactactactagatttcgacctagtaatactaaatccaaaaaggatgttaaacttgaattttttggttttgaagatcatgagacaggaggtgatgaaggaggttctggaagttctaattacaaaattaagtattttggctttgatgatctcagtgaaagcgaagatgatgaagatgatgactgtcaagtagaaagaaagacaagcaaaaaaagaactaaaacagctccatcaccctccttgcagcctcccccagaaagcaatgataattcccaggacagtcagtctggtactaacaatgcagaaaacttggattttacagaggacttgcctggtgtgcctgaaagtgtgaagaagcccataaataaacaaggagataaatcaaaggaaaataccagaaagatttttagtggccccaaacggtcacccacaaaagctgtatataatgccagacattggaatcatccagattcagaagaactgcctgggccaccagtagtaaaacctcagagtgtcacagtgaggctgtcttcaaaggaaccaaatcaaaaagatgatggagtttttaaggctcctgcaccaccatccaaagtgataaaaactgtgacaatacctactcagccctaccaagatatagttactgcactgaaatgcagacgagaagacaaagaattatatactgttgttcagcacgtgaagcacttcaacgatgttgtagaatttggtgaaaatcaagagttcactgatgacattgagtacttgttaagtggcttaaagagcactcagcctctaaacacacgttgccttagtgttattagcttggctactaaatgtgccatgcccagttttcgaatgcacctgagagcacatgggatggtagcaatggtctttaaaaccttggatgattcccagcaccatcagaatctgtccctctgtacagctgccctcatgtatatactgagtagagatcgtttgaacatggatcttgatagagctagcttagatctaatgattcgacttttggaactggaacaagatgcttcatcagccaagctactgaatgaaaaagacatgaacaaaattaaagaaaaaatccgaaggctctgtgaaactgtacacaacaagcatcttgatctagaaaatataacgactgggcatttagctatggagacattattatcccttacttctaaacgagcaggagactggtttaaagaagaactccggcttttgggtggtctggatcatattgtagataaagtaaaagaatgtgtggatcatttaagtagagatgaggatgaagagaaactggtagcctcactatggggagcagagagatgtttacgagttttagaaagtgtaactgtgcataatcccgaaaatcaaagctacttgatagcatataaagattcccaacttattgtttcatcagctaaagcattacagcattgtgaagaactgattcagcagtacaaccgtgctgaggacagcatatgcttagctgacagtaagcctctgcctcaccagaatgtaactaaccatgtaggcaaagcagtggaggactgcatgagggccatcatcggggtgttgcttaatttaactaatgataatgagtggggcagcaccaaaacaggagagcaggacggtctcataggcacagcgctgaactgtgtgcttcaggttccaaagtacctacctcaggagcagagatttgatattcgagtgctgggcttaggtctgctgataaatctagtggagtatagtgctcggaatcggcactgtcttgtcaacatggaaacatcgtgctcttttgattcttccatctgtagtggagaaggggatgatagtttaaggataggtggacaagttcatgctgtccaggctttagtgcagctattccttgagcgagagcgggcagcccagctagcagaaagtaaaacagatgagttgatcaaagatgctcccaccactcagcatgataagagtggagagtggcaagaaacaagtggagaaatacagtgggtgtcaactgaaaagactgatggtacagaagagaaacataagaaggaggaggaggatgaagaacttgacctcaataaagcccttcagcatgccggcaaacacatggaggattgcattgtggcctcctacacggcactacttcttgggtgtctctgccaggaaagtccaatcaatgtaaccactgtgcgggaatatctgccagaaggagacttttcaataatgacagagatgctcaaaaaatttttgagttttatgaatctcactgtgctgttggaacaactggccagaaatctatctctagagtga

SEQ ID NO: 301 - protein, 5 aa, Unknown
  cytokine receptor extracellular motif found in many species
  MISC_FEATURE (3)..(3): "Xaa" at position 3 can be any amino acid.
WSXWS
